(19) United States
(12) Patent Application Publication
(10) Pub. No.: US 2007/0015150 A1
(43) Pub. Date: Jan. 18, 2007

(54) Novel nucleic acid sequences and proteins of tumors and neoplasias of the thyroid gland

(76) Inventor: Jorn Bullerdiek, Bremen (DE)

Correspondence Address: MCDERMOTT WILL & EMERY LLP, 600 13TH STREET, N.W., WASHINGTON, DC, 20005-3096, US

(21) Appl. No.: 10/512,809

(22) PCT Filed: May 2, 2003
(86) PCT No.: PCT/EP03/04642

§ 371 Date: Oct. 28, 2005

(30) Foreign Application Priority Data
May 10, 2002 (DE) 102 19 413.0
Sep. 14, 2002 (DE) 102 42 705.4

(51) Int. Cl. A61K 48/00; C12Q 1/68; C07H 21/04; C12P 21/06; A61K 39/395; C07K 14/82; C07K 16/30

(52) U.S. Cl. 435/6; 514/44; 424/155.1; 435/69.1; 435/320.1; 435/325; 530/350; 530/388.8; 536/23.5

(57) ABSTRACT

The Invention relates to a nucleic acid and proteins of tumors and neoplasias of the thyroid gland. Said nucleic acid comprises a nucleic acid sequence selected among the group consisting of SEQ ID No. 1, 3, 4, 9 and SEQ ID No. 11 to 16. The invention also relates to fusion proteins observed in tumors and neoplasias of the thyroid gland, said fusion proteins containing an amino acid sequence according to SEQ ID No. 2, SEQ ID No. 5 to 8, 10, and 17.

[0001] The present invention relates to nucleic acids with an expression altered by hyperplasias and/or tumors, nucleic acid coding for the human gene DRIP, which is also designated as synonymous to THADA (Thyroid Adenoma Associated), and their tumor specific new combinations and in particular homologens thereof, vectors and cells containing these, polypeptides coded by these, antibodies directed against these, a process for determining compounds suited as tumor therapeutics, a process for determining genes, which are involved in the formation of thyroid gland tumors and uses of said nucleic acids.

[0002] The significance of the thyroid gland as a result of its hormone production for controlling the growth and development of the body has been known for a long time already in medicine, as have the perspicuous changes with a functional disturbance of this gland at least in a few cases in the truest sense of the word.

[0003] With respect to the pathogenesis of goitre and thyroid gland tumors there has generally been no success particularly at a molecular level in developing a comprehensive presentation.

[0004] There are currently two concepts under discussion, whereby one presupposes that the hyperplastic tissue is definitely considered as coming from chronic stimulation by a trophic hormone, the result of which is finally the growth of polyclonal nodes. This concept is designated as non-neoplastic endocrine hyperplasia (NNEH). The second concept is based on the fact that the nodes represent authentic clonal tumors.

[0005] In the case of the thyroid gland it has eventuated that the simple concept of non-neoplastic endocrine hyperplasia applicable to other glands cannot be applied. An overview of the considerations currently being made in this area is found at Studer, H. (1995); Endocrine Reviews, Vol. 16, No. 4, pages 411-426 and Derwahl M and Studer H. (2002), Trends Endocrinol. Metab., Vol. 13 No. 1, pages 23-8.

[0006] Early diagnosis for the treatment of goitre and thyroid gland tumors is therefore necessary to begin to apply appropriate therapeutic concepts.

[0007] The object of the present invention is to provide means for diagnosis and therapy of functional disturbances of the thyroid gland, hyperplasias of the thyroid gland and tumors of the thyroid gland at the molecular level, whereby in particular nucleic acid sequences are to be provided, which are involved in the pathogenetic mechanisms and are also suited to examine these further, as well as those which have an affect on the pathogenesis mechanisms or which can influence them.

[0008] In addition, drugs based thereon and generally pharmaceutical compounds are to be provided.

[0009] Furthermore kits for diagnosis and/or therapy of functional disturbances of the thyroid gland, hyperplasias of the thyroid gland and tumors of the thyroid gland as well as processes for proving the latter are to be made available.

[0010] In terms of the invention the object is solved by a nucleic acid with an expression altered by hyperplasias and/or tumors, whereby the nucleic acid comprises a nucleic acid sequence, which is selected from the group comprising SEQ. ID. No 1, SEQ. ID. No 3, SEQ. ID. No. 4, SEQ. ID. No 9, and SEQ. ID. No 11 to 16 or in each case a part or a fragment thereof. (Here SEQ. ID. No. 11 to SEQ. ID. No. 16 means all sequences from 11 to 16, i.e. SEQ. ID. No. 11, SEQ. ID. No. 12, SEQ. ID. No. 13 etc., to SEQ. ID. No. 16). In connection with the present invention inventive nucleic acids are also those which comprise an exon or the transition area between two exons. The transition area can be so short, as is necessary, to enable specific proof the transition area, in particular for diagnostic application.

[0011] The corresponding lengths are known to the expert in the area. A transition area can be one between two exons of a gene but also one between two exons of two different genes, as this applies for example to the herein disclosed fusion genes, herein also designated synonymously as fusion transcripts. At the same time with the genes and the fusion genes in particular that area or those exons can be used preferably for diagnosis of the presence of herein described tumors and neoplasias of the thyroid gland, which are arranged in the respective breakpoint region, as is disclosed herein.

[0012] In an embodiment it is provided that the tumor is selected from the group which comprises epithelial tumors with a change to the chromosomal band 2p and tumors with a change to the chromosomal band 2p 21-22.

[0013] In a further embodiment it is provided that the hyperplasia is selected from the group which comprises hyperplasias of the thyroid gland.

[0014] In yet another embodiment it is provided that SEQ. ID. No. 11 codes for DRIP, in particular human DRIP, or a part thereof.

[0015] In a further embodiment it is provided that SEQ. ID. No. 12 codes for DRIP, in particular human DRIP, or a part thereof.

[0016] In a further embodiment it is provided that SEQ. ID. No. 16 codes for DRIP, in particular human DRIP, or a part thereof.

[0017] In a further embodiment it is provided that SEQ. ID. No. 1 for the inventive fusion protein or a part thereof codes.

[0018] The inventive fusion protein is also designated herein as DRIP-FUS Ib.

[0019] In a further embodiment it is provided that SEQ. ID. No. 9 codes for the inventive fusion protein or a part thereof.

[0020] The inventive fusion protein is also designated herein as DRIP-FUS IIa.

[0021] In a further embodiment it is provided that SEQ. ID. No. 13 codes for the inventive fusion protein or a part thereof.

[0022] The inventive fusion protein is also designated herein as DRIP-FUS I.

[0023] In a further embodiment it is provided that SEQ. ID. No. 14 codes for the inventive fusion protein or a part thereof.

[0024] The inventive fusion protein is also designated herein as DRIP-FUS Ia.

[0025] In a further embodiment it is provided that SEQ. ID. No. 15 codes for the inventive fusion protein or a part thereof.

[0026] The inventive fusion protein is also designated herein as DRIP-FUS II.

[0027] In a further embodiment it is provided that SEQ. ID. No. 3 codes for FUS I, in particular human FUS I, or a part thereof.

[0028] In a further embodiment it is provided that SEQ. ID. No. 4 codes for FUS II, in particular human FUS II, or a part thereof.

[0029] In yet a further aspect the object according to the present invention is solved by a nucleic acid comprising a nucleic acid sequence, which without the degeneration of the genetic code would code for the same amino acid sequence as one of the inventive nucleic acids.

[0030] In a further aspect the object according to the present invention is solved by a nucleic acid, which hybridises on one of the inventive nucleic acids, in particular under stringent conditions.

[0031] In yet a further aspect the object according to the present invention is solved by a vector, whereby the vector comprises one of the inventive nucleic acids.

[0032] In an embodiment it is provided that the vector further comprises at least one element, selected from the group comprising promoters, terminators and enhancers.

[0033] In a further embodiment it is provided that the vector is an expression vector.

[0034] In yet a further embodiment it is provided that at least a promoter in the in-frame with at least a part coding for a polypeptide is one of the inventive nucleic acids.

[0035] In a further aspect the object according to the present invention is solved by a polypeptide coded by one of the inventive nucleic acids.

[0036] In yet another aspect the object according to the present invention is solved by a polypeptide with an amino acid sequence according to one of the sequences according to SEQ. ID. No. 2, SEQ. ID. No.5 to SEQ. ID. No. 8, SEQ. ID. No. 10 and SEQ. ID. No. 17.

[0037] In an embodiment it is provided that the polypeptide is modified.

[0038] In a further aspect the object according to the present invention is solved by a cell, in particular an isolated cell, which comprises an inventive vector.

[0039] In a further aspect the object according to the present invention is solved by an antibody, whereby the antibody is directed against an inventive polypeptide.

[0040] In an embodiment it is provided that the antibody is directed against one of the inventive nucleic acids.

[0041] In a further aspect the object according to the present invention is solved by a ribozyme, whereby the ribozyme is directed against one of the inventive nucleic acids.

[0042] In an embodiment it is provided that the ribozyme comprises at least part of one of the inventive nucleic acids or of a nucleic acid substantially complementary thereto.

[0043] In a further aspect the object according to the present invention is solved by an antisense nucleic acid comprising a sequence, which corresponds substantially to the whole or partial sequence or is substantially complementary to one of the inventive nucleic acid sequences. As used herein the term “substantially” designates independently of the respective context, in which it is used, homology of at least 70%, preferably at least 80% and preferably at least 90%.

[0044] In yet a further aspect the object according to the present invention is solved by an interfering RNA, herein also designated as RNAi, preferably by a small interfering RNA, comprising a sequence which is substantially complementary or substantially identical to one of the nucleic acids as claimed in any one of Claims 1 to 8 or part thereof, whereby the RNAi preferably comprises an area with a length of 21 to 23 nucleotides, which is substantially complementary or substantially identical.

[0045] In a further aspect the object according to the present invention is solved by a primer or a nucleic acid probe comprising a nucleic acid, whereby the nucleic acid is substantially complementary or substantially identical is to one of the inventive nucleic acids or a part thereof, whereby the primer and/or the nucleic acid probe comprises a length of 12 to 32 nucleotides, preferably of 14 to 28 nucleotides and preferably of 20 to 28 nucleotides.

[0046] In a further aspect the object according to the present invention is solved by a process for determining a compound, which influences and in particular inhibits the effect of a translation product of an inventive nucleic acid according to one of the foregoing claims, comprising the following steps:
[0047] provision of the translation product and the compound,
[0048] bringing the translation product and the compound into contact in a system, which represents the effect of the translation product, and
[0049] determining whether a change in the effect of the translation product occurs under the influence of the compound.

[0050] In an embodiment the compound is a cancer or tumor agent.

[0051] In a further aspect the object according to the present invention is solved by a process for determining a compound, which influences, in particular inhibits, the effect of a transcription product of one of the inventive nucleic acids comprising the following steps:
[0052] provision of the transcription product and the compound,
[0053] bringing the transcription product and the compound into contact in a system, which represents the effect of the transcription product, and
[0054] determining whether a change in the effect of the transcription product occurs under the influence of the compound.

[0055] In an embodiment the compound is a cancer or tumor means.

[0056] In an embodiment it is provided that the system is selected from the group, which comprises cellular expression systems, cell-free expression systems, assay for determining the interaction between compound and translation products, and assay for determining the interaction between compound and transcription products.

[0057] In a further aspect the object according to the present invention is solved by a process for determining genes, which are responsible for the occurrence of hyperplasias and tumors, in particular of the thyroid gland, comprising the following steps:
[0058] detecting the break points in chromosomal translocations of the hyperplasias and the tumors,
[0059] determining genes, which lie inside an area of approximately 400 kbp, preferably approximately 320 kB, preferably approximately 150 kbp, in every direction from the breakpoint region, and
[0060] determining whether the translation/transcription of the gene in a cell of the hyperplasia or of the tumor is changed relative to a non-hyperplasia cell or a non-tumor cell.

[0061] In yet a further aspect the object according to the present invention is solved through use of one of the inventive nucleic acids, of the inventive ribozyme, the inventive antisense-nucleic acid, the inventive RNAi and/or the inventive nucleic acid probe for diagnosis, in particular in vitro, and/or therapy of functional disturbances of the thyroid gland and/or hyperplasias of the thyroid gland and/or tumors, in particular thyroid gland tumors.

[0062] In yet a further aspect the object according to the present invention is solved through the use of one of the inventive nucleic acids, the inventive ribozyme, the inventive antisense-nucleic acid, the inventive RNAi and/or the inventive nucleic acid probe for manufacturing a drug, in particular for therapy and/or prevention of functional disturbances of the thyroid gland and/or hyperplasias of the thyroid gland and/or tumors, in particular thyroid gland tumors.

[0063] In a further aspect the object according to the present invention is solved through the use of one of the inventive polypeptides for diagnosis, in particular in vitro, and/or therapy of functional disturbances of the thyroid gland and/or hyperplasias of the thyroid gland and/or tumors, in particular thyroid gland tumors.

[0064] In yet a further aspect the object according to the present invention is solved through the use of one of the inventive polypeptides for manufacture of a drug.

[0065] In a further aspect the object according to the present invention is solved through the use of one of the inventive antibodies for diagnosis, in particular in vitro, and/or therapy of functional disturbances of the thyroid gland and/or hyperplasias of the thyroid gland and/or tumors, in particular thyroid gland tumors.

[0066] In a further aspect the object according to the present invention is solved through the use of one of the inventive antibodies for manufacture of a drug, in particular for therapy and/or prevention of functional disturbances of the thyroid gland and/or hyperplasias of the thyroid gland and/or tumors, in particular thyroid gland tumors.

[0067] In yet a further aspect the object according to the present invention is solved by a kit for diagnosis of functional disturbances of the thyroid gland and/or hyperplasias of the thyroid gland and/or thyroid gland tumors, characterised in that the kit comprises at least one element, selected from the group which comprises a nucleic acid, a vector, a polypeptide, a cell, an antibody, a ribozyme, an antisense-nucleic acid, RNAi, a primer, and/or a nucleic acid probe, in each case as claimed in any one of the foregoing claims.

[0068] In yet a further aspect the object according to the present invention is solved by a process for proving functional disturbances of the thyroid gland and/or hyperplasias of the thyroid gland and/or tumors of the thyroid gland, comprising the following steps:

[0069] contacting thyroid gland material with the agent, selected from the group which comprises a nucleic acid, a vector, a polypeptide, an antibody, a ribozyme and a cell, in each case according to the present invention, and determining whether functional disturbances of the thyroid gland and/or hyperplasias of the thyroid gland and/or tumors of the thyroid gland are present.

[0070] In an embodiment it is provided that the thyroid gland material is present ex vivo.

[0071] In an embodiment it is provided that the thyroid gland material is part of a cytological preparation.

[0072] In yet a further aspect the object according to the present invention is solved through the use of one of the inventive nucleic acids and of a part thereof as primer and/or as probe.

[0073] In yet a further aspect the object according to the present invention is solved by a primer for displaying and/or screening and/or detecting an inventive nucleic acid, and the primer or the probe is substantially complementary or substantially identical to a part of one of the inventive nucleic acid sequences.

[0074] In yet a further aspect the object according to the present invention is solved by the process for displaying a nucleic acid, which comprises a sequence, which can be proven in thyroid gland tumors or goitre, in which translocation with fracture point is in the chromosomal band 2p21-22, whereby the sequence lies inside the chromosomal band 2p21-22, whereby the process comprises the steps:
[0075] providing an inventive primer for carrying out a polymerase chain reaction,
[0076] providing a nucleic acid sequence taken from the band 2p21-22 of the human chromosome 2 or one of the inventive nucleic acids,
[0077] mixing the nucleic acid sequence or the nucleic acid with the primers,
[0078] carrying out a polymerase chain reaction.

[0079] In yet a further aspect the object according to the present invention is solved by a pharmaceutical composition, comprising: at least one agent, selected from the group which comprises a nucleic acid, a vector, a polypeptide, a cell, an antibody, an antisense-nucleic acid, RNAi, a primer and/or a nucleic acid probe and/or a ribozyme, in each case according to the present invention, as well as combinations thereof, and at least a pharmaceutically acceptable carrier.

[0080] In yet a further aspect the object according to the present invention is solved by a process for treatment and/or prophylaxis of tumors and hyperplasias, whereby it is provided that a compound is administered to a patient, in particular a patient who suffers from a tumor, in particular a thyroid gland tumor or hyperplasia, which hinders the effects of the changed expression of one of the inventive nucleic acids.

[0081] At the same time the change can be both an increase of the expression and also a decrease of the expression.

[0082] In a further aspect the object according to the present invention is solved through the use of a compound, which hinders the effects of the changed expression of one of the inventive nucleic acids, for the manufacture of a drug.

[0083] In an embodiment it is provided that the drug is or is employed for treatment and/or prophylaxis of tumors, in particular tumors of the thyroid gland, and/or hyperplasias.

[0084] In a further aspect the object according to the present invention is solved through the use of a nucleic acid having a sequence selected from the group comprising SEQ. ID. No. 1, 3, 4, 9 and SEQ. ID. No. 11 to 16, or derivatives thereof and/or polypeptides coded therefrom or derivatives thereof for manufacture of a drug, in particular for treatment of functional disturbances of the thyroid gland and/or hyperplasias of the thyroid gland and/or thyroid gland tumors and/or for manufacture of a diagnostic agent, in particular for the diagnosis of functional disturbances of the thyroid gland and/or hyperplasias of the thyroid gland and/or thyroid gland tumors.

[0085] In an embodiment it is provided that the polypeptide has an amino acid sequence according to No. 2, SEQ. ID. No. 5 to 8, 10 and 17.

[0086] In an embodiment it is provided that the nucleic acid would hybridise with the nucleic acid according to one of SEQ. ID. No. 1, 3, 4, 9 and SEQ. ID. No. 11 to 16 without the degeneration of the genetic code.

[0087] In a further aspect the object according to the present invention is solved through the use of a polypeptide with a sequence, whereby the sequence is selected from the group, which comprises SEQ. ID. No. 2, SEQ. ID. No. 5 to 8, 10 and 17, or derivatives thereof for manufacture of a drug, in particular for treatment of functional disturbances of the thyroid gland and/or hyperplasias of the thyroid gland and/or thyroid gland tumors and/or for manufacture of a diagnostic agent, in particular for the diagnosis of functional disturbances of the thyroid gland and/or hyperplasias of the thyroid gland and/or thyroid gland tumors.

[0088] In a further aspect the object according to the present invention is solved by a process for screening an agent for treatment of functional disturbances of the thyroid gland and/or hyperplasias of the thyroid gland and/or tumors, in particular thyroid gland tumors, and/or of a diagnostic means for the diagnosis of functional disturbances of the thyroid gland and/or hyperplasias of the thyroid gland and/or tumors, in particular thyroid gland tumors, comprising the steps:
[0089] providing a candidate compound,
[0090] providing an expression system and/or activity system;
[0091] bringing the candidate compound in contact with the expression system and/or the activity system;
[0092] determining whether under the influence of the candidate compound the expression and/or the activity of a nucleic acid with a sequence, whereby the sequence is selected from the group, comprises SEQ. ID. No. 1, 3, 4, 9 and SEQ. ID. No. 11 to 16, or derivatives thereof and/or polypeptides coded therefrom and/or polypeptides with a sequence according to SEQ. ID. 2, SEQ. ID. No. 5 to 8, 10 and 17 derivatives thereof is changed.

[0093] In an embodiment it is provided that the candidate compound is contained in a compound library.

[0094] In an embodiment it is provided that the candidate compound is selected from the group of compound classes, which comprises peptides, proteins, antibodies, anticalins, functional nucleic acids and small molecules.

[0095] In an embodiment it is provided that the functional nucleic acids are selected from the group comprising aptamers, aptazymes, ribozymes, spiegelmers, antisense-oligonucleotides and RNAi.

[0096] In a further aspect the object according to the present invention is solved through use of a nucleic acid with a sequence, whereby the sequence is selected from the group, which comprises SEQ. ID. No. 1, 3, 4, 9 and SEQ. ID. No. 11 to 16, or derivatives thereof and/or polypeptides coded therefrom or derivatives thereof and/or a polypeptide with a sequence according to SEQ. ID. No. 2, SEQ. ID. No. 5 to 8, 10 and 17 or of a derivative thereof and/or in particular of a natural interaction partner of a nucleic acid with a sequence, whereby the sequence is selected from the group, which comprises SEQ. ID. No. 1, 3, 4, 9 and SEQ. ID. No. 11 to 16, or derivatives thereof and/or polypeptides coded therefrom or derivatives thereof and/or a nucleic acid coding therefor and/or the interaction partner of a polypeptide with a sequence according to SEQ. ID. No. 2, SEQ. ID. No. 5 to 8, 10 and 17 or of a derivative thereof as target molecule for the development and/or manufacture of a diagnostic means for diagnosis of functional disturbances of the thyroid gland and/or hyperplasias of the thyroid gland and/or thyroid gland tumors, and/or for the development and/or manufacture of a drug for prevention and/or treatment of functional disturbances of the thyroid gland and/or hyperplasias of the thyroid gland and/or tumors, in particular tumors of the thyroid gland.

[0097] In an embodiment it is provided that the drug or the diagnostic agent comprises an agent selected from the group, which comprises antibodies, peptides, anticalins, small molecules, antisense-molecules, aptamers, spiegelmers and RNAi molecules.

[0098] In an embodiment it is provided that the agent interacts with a nucleic acid having a sequence, whereby the sequence is selected from the group, which comprises SEQ. ID. No. 1, 3, 4, 9 and SEQ. ID. No. 11 to 16, or derivatives thereof and/or with a nucleic acid coding for a natural interaction partner in particular, interacts in particular with mRNA, genomic nucleic acid or cDNA.

[0099] In a further aspect the object according to the present invention is solved through use of a polypeptide, which interacts with a peptide, coded by a nucleic acid with a sequence, whereby the sequence is selected from the group, which comprises SEQ. ID. No. 1, 3, 4, 9 and SEQ. ID. No. 11 to 16, or derivatives thereof and/or a polypeptide according to SEQ. ID. No. 2, SEQ. ID. No. 5 to 8, 10 and 17 and/or interacts with a natural interaction partner thereof in particular for development or manufacture of a diagnostic means for diagnosis of functional disturbances of the thyroid gland and/or hyperplasias of the thyroid gland and/or thyroid gland tumors, and/or for development or manufacture of a drug for prevention and/or treatment of functional disturbances of the thyroid gland and/or hyperplasias of the thyroid gland and/or tumors, in particular thyroid gland tumors.

[0100] In an embodiment it is provided that the polypeptide is selected from the group comprising antibodies and binding polypeptides.

[0101] In a further aspect the object according to the present invention is solved through the use of a nucleic acid, which interacts with a polypeptide, whereby the polypeptide is coded by a nucleic acid with a sequence, whereby the sequence is selected from the group, which comprises SEQ. ID. No. 1, 3, 4, 9 and SEQ. ID. No. 11 to 16, or derivatives thereof and/or a polypeptide according to SEQ. ID. No. 2, SEQ. ID. No. 5 to 8, 10 and 17 and/or with a natural interaction partner thereof in particular for development or manufacture of a diagnostic means for diagnosis of functional disturbances of the thyroid gland and/or hyperplasias of the thyroid gland and/or thyroid gland tumors, and/or for development or manufacture of a drug for prevention and/or treatment of functional disturbances of the thyroid gland and/or hyperplasias of the thyroid gland and/or tumors, in particular thyroid gland tumors.

[0102] In an embodiment it is provided that the nucleic acid is selected from the group, which comprises aptamers and spiegelmers.

[0103] In a further aspect the object according to the present invention is solved through the use of a first nucleic acid, which interacts with a second nucleic acid, whereby the second nucleic acid has a sequence, whereby the sequence is selected from the group, which comprises SEQ. ID. No. 1, 3, 4, 9 and SEQ. ID. No. 11 to 16, or derivatives thereof and/or interacts with a nucleic acid, which codes for an interaction partner of a polypeptide with a sequence according to SEQ. ID. No. 2, SEQ. ID. No. 5 to 8, 10 and 17 for development or manufacture of a drug for prevention and/or treatment of functional disturbances of the thyroid gland and/or hyperplasias of the thyroid gland and/or tumors, in particular thyroid gland tumors.

[0104] In an embodiment it is provided that the interacting first nucleic acid is an antisense-oligonucleotide, a ribozyme and/or RNAi.

[0105] In an embodiment of the last two aspects it is provided that the second nucleic acid is the respective cDNA or mRNA.

[0106] In a further aspect the object according to the present invention is solved by a pharmaceutical composition comprising at least an agent, selected from the group, as defined by the different inventive uses, and at least a pharmaceutically acceptable carrier, in particular for prevention and/or treatment of functional disturbances of the thyroid gland and/or hyperplasias of the thyroid gland and/or tumors, in particular thyroid gland tumors.

[0107] In a further aspect the object according to the present invention is solved by a kit for characterising the status of the thyroid gland, comprising at least an agent, defined by one of the inventive uses.

[0108] In a further aspect the object according to the present invention is solved by a polypeptide comprising an amino acid sequence according to SEQ. ID. No. 2, SEQ. ID. No. 5 to 8, 10 and 17 or a functional fragment thereof.

[0109] In a further aspect the object according to the present invention is solved through use of the inventive polypeptide according to one of the inventive uses.

[0110] Further aspects and embodiments of the invention will emerge from the claims.

[0111] The surprising knowledge of the present invention is that there is a series of genes or nucleic acid sequences, whereof the expression modified relative to normal tissue can be compounded with the appearance of tumors and hyperplasias and seems to be connected thereto causally.

[0112] Within the scope of the present invention it was established that in the case of certain hyperplasias or tumors the result is a change in the expression of specific genes or sequences. Change should be understood here in particular as either an increase in expression or a decrease in expression. The extent of the expression of the gene in question or the sequence in question in cells or tissue, which is or are different to cells of hyperplasias or tumors, serves as reference in this respect.

[0113] Within the scope of the present invention it was further established that in the case of specific hyperplasias or tumors this lead to a change in the nucleotide sequence of specific genes or sequences with respect to normal tissue. Such sequences, herein also designated as fusion genes, fusion proteins or fusion transcripts, are for example the herein disclosed DRIP-FUS 1 and DRIP-FUS II with their respective splice variants, or the nucleic acids and amino acid sequences coding for them.

[0114] Finally, within the scope of the present invention it was also established that cells from thyroid gland tumors and also cultivated cells from thyroid gland tumors often have a break at chromosome 2p21-22. Here the breakpoint region could be restricted to 316 kbp. 206 kbp of the DRIP gene lie in the breakpoint region (synonymous also as break point cluster). More exactly, the exons 27 to 38 are in the breakpoint region. The 3′ end of the DRIP gene lies to the telomer of the chromosome 2p. The DNA of the DRIP gene is 365186 bp long and has a total of 38 exons. The mRNA sequence and different splice variants are specified in the different SEQ. ID. Nos.

[0115] The herein disclosed sequence of the DRIP gene contains a series of coding sequences (English=CDS). Several possible coding sequences can be determined, whereby the first AUG of the specified DRIP mRNA is favoured as translation start, which represent all inventive nucleic acids or amino acid sequences and peptides or proteins in terms of the present invention. An interaction partner of the DRIP gene or of the polypeptide coded therefrom is represented by the so-called death receptor (English death receptor).

[0116] As long as reference is made to “stringent conditions” these are conditions as described herein, in particular in the examples, in connection with PCR, Northern Blot and Southern Blot.

[0117] Within the scope of the present invention in the sequence protocol mRNA sequences can also be represented as DNA sequences. Further to this, coding sequences (CDS) can also be represented in the form of the translated amino acid sequence.

[0118] An area of genomic DNA of 506 kbp was examined to determine the genomic structure of the break point cluster. The BAC clones illustrated in Table 1 were employed for this purpose and analysed.

TABLE 1
Examined BAC clones at the breakpoint region.
The more precise origin of the BAC clones (e.g. library
etc.) is evident from the gene bank entries.

| | Accession no. | Size/fully |
|---|---|---|
| Clone name | in gene bank | sequenced |
| 339H12 | AC010883 | 215532 bp/yes |
| 183F15 | AC092838 | 112424 bp/yes |
| 204D19 | AC092615 | 180345 bp/yes |

[0119] 206 kbp of the herein disclosed DRIP genes lie in the breakpoint region, whereby more exactly the exons 27 to 38 lie in the breakpoint region. The 3′ end of the DRIP gene lies to the telomer.

[0120] An illustration of the break point region is shown in FIG. 12.

The DRIP Gene

Genomic Organisation of the DRIP Gene

Genomic Size of the DRIP Gene

[0121] The DRIP gene is 365186 bp large and fully displayed in SEQ. ID. No. 12. In Table 2 the exon and intron sizes and their relative position to specific clones are laid out.

[0122] Herein the formulations Seq. ID. No. and SEQ. ID. No. are also used.

TABLE 2
Size details of the DRIP gene.

| | | | | | mRNA or EST name |
|---|---|---|---|---|---|
| | | | | | (region of each exon or |
| | | Size | | BAC clone, | intron of this table |
| Exon No. | Intron No. | [in bp] | | name in which | line is homologous) |
| 1 | | 108 | | 204D19 | a1832141 (2-109) |
| | 1 | 3514 | | 204D19 | |
| 2 | | 100 | | 204D19 | a1832141 |
| | 2 | 270 | | 204D19 | |
| 3 | | 95 | | 204D19 | a1832141 |
| | 3 | 997 | | 204D19 | |
| 4 | | 131 | | 204D19 | a1832141 |
| | 4 | 3821 | | 204D19 | |
| 5 | | 149 | | 204D19 | a1832141 |
| | 5 | 119 | | 204D19 | |
| 6 | | 33 | | 204D19 | AL832141 |
| | 6 | 252 | | 204D19 | |
| 7 | | 49 | | 204D19 | AL832141 |
| | 7 | 4471 | | 204D19 | |
| 8 | | 188 | | 204D19 | AL832141 |
| | 8 | 3133 | | 204D19 | |
| 9 | | 95 | | 204D19 | AL832141 |
| | 9 | 1278 | | 204D19 | |
| 10 | | | | 204D1 | AL832141 |
| | 10 | 204D19 | | 204D1 | |
| 11 | | | | 204D1 | AL832141 |
| | 1 | 1343 | | 204D1 | |
| 12 | | 179 | | 204D1 | AL832141 |
| | 12 | 951 | | 204D1 [symbol] | |
| 13 | | 156 | | 204D1 | AL832141 |
| | 1 | 1196 | | 204D1 | |
| 14 | | 123 | | 204D1 | AL832141 |
| | 1 | 3566 | | 244D1 | |
| 15 | | 124 | bp | 204D1 [symbol] | AL832141 |
| | | | | | [symbol] |
| | 1 | 6312 | bp | 204D1 | |
| 16 | | 152 | bp | 204D1 | FLJ21792 (2S3-404) |
| | 1 | 3678 | bp | 204D1 | |
| 17 | | 211 | bp | 204D1 | FLJ21792 (405-615) |
| | 1 | 4005 | bp | 204D1 | |
| 18 | | 136 | bp | 204D1 | FLJ21792 (616-751) |
| | 1 | 278 | bp | 204D1 | |
| 19 | | 137 | bp | 204D1 | FL321792 (752-888} |
| | 1 | 2420 | bp | 204D1 | |
| 20 | | 159 | bp | 204D1 | FLJ21792 (889-1047) |
| | 2 | 7893 | bp | 204D1 | |
| 21 | | 158 | bp | 204D1 | FLJ21792 (1048-1205) |
| | 2 | 13170 | | 204D1 | |
| 22 | | 1270 | | 204D19 | KLAA1767 (48-1317) |
| long | | | | | FLJ21877, 3881bp (27-1296) |
| variant | | | | | |
| 22 | | | | | |
| | 2 | 19098 | bp | 204D19 | |
| 23 | | 133 | bp | 204D19 | KIA.A1767 (1318-1450) |
| | | | | | PLJ21877, 3881bp |
| | | | | | (1297-1429) |
| | | | | | FLJ21792 (1316-1448) |
| | 2 | 2912 | bp | 204D19 | |
| 24 | | 114 | bp | 204D19 | KIAA1767 (1451-1564) |
| | | | | | FLJ21877, 3881bp |
| | | | | | (1430-1543) |
| | | | | | FLJ21792 (1449-1562) |
| | 2 | 6666 | bp | 204D 19 | |
| 25 | | 123 | bp | 204D19 | KIAA1767 (1565-1687) |
| | | | | | FLJ21877, 388Ibp |
| | | | | | (1544-1666) |
| | | | | | FLJ21792 (1563-1685) |
| | | 13507 | bp | 204D19 | |
| 26 | | 92 | bp | 204D19 | KIA.A.1767 (1688-1779) |
| | | | | | FLJ21877, 3881bp |
| | | | | | (1667-1758) |
| | | | | | FLJ21792 (1686-1777) |
| | 26 | 54931 | bp | 204D191 | |
| | | | | 183F15 | |
| 27 | | 90 | bp | 183F15 | KIAA1767 (1780-1869) |
| | | | | | FL, J21877, 38$lbp |
| | | | | | (1759-1848) |
| | | | | | FLJ21877, 2I96bp (50-139) |
| | 27 | 1981 | bp | 183F15 | |
| 28 | | 132 | bp | 183F15 | KIAA1767 (1870-2001) |
| | | | | | FLJ21877, 3881bp |
| | | | | | (1849-1980) |
| | | | | | FLJ21877, 2196bp (140-271) |
| | | | | | AF323176, cds (1-128) |
| | | | | | FLJ21877, 2125bp (93-224) |
| | 2 | 29960 | bp | 183F15 | |
| 29 | | 169 | bp | 183F15 | KIAA1767 (2002-2170) |
| | | | | | FLJ21877, 3881bp |
| | | | | | (1981-2149) |
| | | | | | FI, J21792 (1778-1946) |
| | | | | | FLJ21877, 2196bp (272-440) |
| | | | | | AF323176, cds (129-297) |
| | | | | | FLJ21877, 2125bp (225-393) |
| | 29 | 53733 | bp | 183F15 | |
| 30 | | 116 | bp | 183F15 | KIIAA1767 (2171-2286) |
| | | | | | FLJ21877, 3881bp (2150-2265) |
| | | | | | FLJ21792 (1947-2062) |
| | | | | | FLJ2I877, 2196bp (44I- |
| | | | | | 556) |
| | | | | | AF323176, cds (298-413) |
| | | | | | FLJ21877, 2125bp (394-509) |
| | 30 | 116587 | bp | 183F157 | |
| | | | | 339H12 | |
| 31 | | 95 | bp | 183F15 | KIAA1767 (2287-2381) |
| | | | | 339HI2 | FLJ2I877, 388Ibp (2266-2360) |
| | | | | | FLJ21792 (2063-2157) |
| | | | | | FLJ21877, 21966p (SS7- |
| | | | | | 651) |
| | | | | | AF323176 (414-508) |
| | | | | | FLJ21877, 2125bp (510-604) |
| | 31 | 27232 | bp | 183FI57 | |
| | | | | 3391412 | |
| 32 | | 380 | bp | 183F15 | KIAA1767 (2382-2761) |
| | | | | 339H12 | FLJ21877, 3881bp (2361-2740) |
| | | | | | FL321792 (2158-2537) |
| | | | | | FLJ21877, 2196bp (652-1031) |
| | | | | | AF323176 (509-888) |
| | | | | | FLJ21877, 2125bp (605-984) |
| | 32 | 611 | bp | 183F157 | |
| | | | | 339H12 | |
| 33 | | 119 | bp | 183F15 | KIAA1767 (2762-2880) |
| | | | | 3391112 | FLJ21877, 3881bp (2741-2859) |
| | | | | | FLJ21792 (2538-2656) |
| | | | | | FLJ21877, 2196bp (1032-1150) |
| | | | | | AF323176 (889-1007) |
| | | | | | FLJ21877, 2125bp (985-1103) |
| | 33 | 335 | bp | 183F157 | |
| | | | | 339H12 | |
| 34 | | 73 | bp | 183F15 | KIA.A1767 (2881-2953) |
| | | | | 339H12 | FLJ21877, 3881bp (2860-2932) |
| | | | | | FLJ21792 (2657-2729) |
| | | | | | FLJ21877, 2196bp (1151-1223) |
| | | | | | AF323176 (1008-1080) |
| | | | | | FLJ21877, 2125bp (1104-1176) |
| | 34 | 4634 | bp | 183F151 | |
| | | | | 339H12 | |
| 35 | | 154 | bp | 339H12 | KIAA1767 (2954-3107) |
| | | | | | FLJ21877, 3881bp {2933- |
| | | | | | 308b} |
| | | | | | FLJ21792 (2730-2883) |
| | | | | | FLJ21877, 2196bp (1224-1377) |
| | | | | | AF323176 (1081-1234) |
| | | | | | FLJ21877, 2125bp (1177-1330) |
| | | 7011 | bp | 339H12 | |
| 36 | | 132 | bp | 339H12 | KIAA1767 (3108-3239) |
| | | | | | FLJ21877, 3881bp (3088-3219) |
| | | | | | FI, J21792 (2884-3015) |
| | | | | | FLJ21877, 2196bp (1378-1509) |
| | | | | | AF323176 (1235-1366) |
| | | | | | FLJ21877, 2125bp (1332-1463) |
| | 36 | 46882 | bp | 334H12 | |
| 37 | | 170 | bp | 339H12 | KIAA1767 (3240-3409) |
| | | | | | FLJ21877, 3881bp |
| | | | | | (3220-3389) |
| | | | | | FLJ21792 (3016-3185) |
| | | | | | FLJ21877, 2196bp |
| | | | | | (15I0-1679) |
| | | | | | AF323176 (1367-1536) |
| | | | | | FLJ21877, 2125bp |
| | | | | | (1464-1633) |
| | 37 | 1369 | bp | 339H12 | |
| 38 | | 492 | bp | 339H12 | KIAA1767 (3410-3901) |
| | | | | | FLJ21877, 388ibp |
| | | | | | (3390-3881) |
| | | | | | FL321792 (3186-3677) |
| | | | | | FLJ21877, 2196bp |
| | | | | | (1680-217 I) |
| | | | | | AF323176 (1537-1932) |
| | | | | | FL, 121877, 2125bp |
| | | | | | (1634-2125) |

| | |
|---|---|
| length | 6090 |
| exons only | |
| length | 339664 |
| exons + | |
| introns | |

DRIP mRNA Structure

[0123] The DRIP gene has splice variants. The largest transcript has 6090 bp. The herein disclosed sequence contains all possible CDs. The exon sizes are reproduced in Table 2.

DRIP Transcripts

[0124] There are two DRIP transcripts. SEQ. ID. No. 11 describes the cDNA transcript of exon 1 to exon 38. SEQ. ID. No. 16 describes a splice variant of DRIP cDNA transcript of exon 1 to exon 26 and of exon 29 to exon 38. FIG. 13 is a schematic illustration of the DRIP mRNA structure.

[0125] In summary the different transcripts of the DRIP gene can be characterised as follows.

[0126] The DRIP standard transcript comprises 6090 bp and 38 exons.

[0127] In a splice variant of DRIP mRNA exon 27 and exon 28 are missing.

[0128] In addition to this, there are still DRIP-homologous EST's and mRNAs, shown in Table 4.

TABLE 3
List of homologous DRIP mRNAs, i.e. corresponding
to the gene

| | | | Date of the |
|---|---|---|---|
| | Accession no. | | data bank |
| mRNA | in gene bank | | entry in gene |
| Name | data bank | Size | bank |
| FLJ21877 | XM_087098 | 388 lbp | 06-FEB-2002 |
| FLJ21877 | NM_022065 | 2196 bp | 10-DEC-2001 |
| FLJ21877 | XM_010906 | 2125 bp | 16-OCT-2001 |
| FLJ21792 | AK025445 | 3697 bp | 29-SEP-2000 |
| death | AF323176 | 1932 bp | 20-FEB-2001 |
| receptor- | | | |
| interacting | | | |
| protein | | | |
| KIAA1767 | AB051554 | 3901 bp | 07-FEB-2001 |

DRIP Expression

[0129] The DRIP gene is expressed ubiquitously. A reference to expression data is found in the Unigene Databank of the NCBI under cluster no. Hs 16063 Homo sapiens. This results in for example a strong expression in the Sage Northern in the tumor cell line MCF7 (Mamma tumor cell line). Evident in the Northern Blot, as shown in FIG. 11, is a reinforced expression in the stomach thyroid gland and in the testicles.

DRIP-Protein Open Reading Frame of the DRIP Gene

[0130] The open reading frame (ORF) of the DRIP gene is represented in FIG. 13 and contained in SEQ. ID. No. 11 and SEQ. ID. No. 16. The positions of start and finish of the ORF are established in the descriptions to both SEQ. ID. No.

Characterising of the Inventive Fusion Gene DRIPFUS1 from Thyroid Gland Tumors

[0131] As described in greater detail in Example 1 in the thyroid gland cell line S325t/sv40 there is a fusion chromosome of (2) with a small piece of the chromosome 3 (from 3p to 3 telomer). Resulting from this fusion chromosome is a DRIP fusion protein, which is designated herein as DRIP-FUS 1. A report plan of the mRNA von DRIP-FUS I with its splice variants is represented in FIG. 14. The mRNA is shown in SEQ. ID. No. 1, SEQ. ID. No. 13, SEQ. ID. No. 14 and the amino acid sequences are shown in SEQ. ID. No 6, SEQ. ID. No. 7, SEQ. ID. No. 2.

[0132] The DRIP-FUS I fusion gene cDNA and its splice variants were determined with a standard 3′ RACE technique The added sequence of the chromosome 3 originates from the BAC clones Rpll-167M22 (Acc.: AC093174) and RplI-33519 (Acc.: AC091492). Homology of the sequence of chromosome 3 to known genes is not evident. These are new gene structures, expressed only in tumors.

[0133] Without wanting to be held to it, the present inventor assumes that the DRIP-FUSI gene is involved decisively in the hyperplasia and tumor formation. The gene or the sequence coding for it is an inventive nucleic acid and within the scope of the herein disclosed uses can be applied correspondingly. Furthermore, an inventive nucleic acid is also part of the nucleic acid sequence coding for the inventive fusion protein, originating from chromosome 2. The same applies to the part of the nucleic acid sequence originating from chromosome 3. The inventive used sequences, i.e. partial sequences, result directly from the sequence according to SEQ. ID. No. 1, SEQ. ID. No. 13, SEQ. ID. No. 14 or the annotations therefrom. The same applies for the polypeptide or the corresponding amino acid sequence.

[0134] Further fusion genes/fusion proteins are described in the figures.

[0135] Finally, it is within the scope of the present invention that all herein disclosed exons, transcripts, cDNAs, ORFs and the like understood as inventive nucleic acids and can be utilised according to the present disclosure.

[0136] Examples of the relevant tumors are in particular a first group of epithelial tumors, in particular those with a change in the chromosomal band 2p21-22, and a second group of tumors, showing change in the chromosomal Arm 2p.

[0137] Change is understood to mean herein in particular chromosome translocation, chromosome deletion, chromosome insertion and chromosome inversion.

[0138] The first group of tumors comprises in particular also tumors of the thyroid gland and preferably epithelial tumors of the thyroid gland. The second group of tumors comprises, inter alia, leukaemias, such as for example chronic lymphatic leukaemia or acute myeloic leukaemia, B-cell lymphoma, gliomas, malignant fibrous histocytomes, osteosarcomas, leiomyosarcomas, liposarcomas, ovarian tumors, breast tumors, renal carcinomas, pancreas carcinomas and gall bladder carcinomas.

[0139] According to WHO classification tumors of the thyroid gland are mostly epithelial in nature and can be divided into benign and malignant forms. With benign thyroid gland tumors a difference is made between “genuine” adenomas and thyroid gland hyperplasias, i.e. benign, adenomatous struma nodes, which are designated as “tumor-like lesions”. These hyperplasias are mostly polyclonal nodes and often have a variable, macrofollicular structure, with incomplete capsule formation. Thyroid gland adenomas on the contrary are encapsulated tumors, which are derived from the follicle epithelium. These mostly solitary occurring tumors are structured similarly and differ structurally from the neighbouring thyroid gland tissue. They can be subdivided microscopically (fine tissue) according to their degree of differentiation into normofollicular (simple/easy), macrofollicular (colloidal), microfollicular (foetal), trabecular or solid (embryonal) adenomas.

[0140] The abbreviation DRIP used herein stands for the English term “death receptor interacting protein” (German: death receptor interagierendes Protein). This protein is a ligand or adapter of death receptors (Engl. death receptors), in particular of death receptor 5(DR5), and is involved in the function of apoptosis of the cellular occurrence. The DRIP gene is confronted by a function in signal initiation or signal forwarding.

[0141] It is within the scope of the present invention that the inventive sequences generally also comprise sequences in each case complementary, which result in particular from Watson-Crick base pairing.

[0142] Within the scope of the present invention further such nucleic acid sequences are comprised, which hybridise in particular under the standard conditions for Northern Blot hybridising for the proof single-copy sequences with the sequences according to SEQ. ID. No. 1, SEQ. ID. No. 3, SEQ. ID. No. 4, SEQ. ID. No. 9 and/or SEQ. ID. No. 11 to SEQ. ID. No. 16, or would hybridise with such sequences without the degeneration of the genetic code. Suitable hybridising conditions are for example the following. A specific fragment is used as molecular probe. The radioactive marking with 32P took place according to the principle of “random primer extension”. According to a prehybridising of the inExpressHyb hybridising solution membrane (Clontech Laboratories, Palo Alto, U.S.A. ) for 30 min at 68° C. hybridising of the membrane took place with 100 ng probe inExpressHyb hybridising solution for 60 min at 68° C. Next the membrane is washed twice for 20 min at room temperature in 2×SSC/0.05% SDS and four times for 10 min at 50° C. in 0.1×SSC/0.1% SDS. The signals are detected for example on a STORM phosphorous imager (Molecular Dynamics, Sunnyvale, U.S.A.).

[0143] Nucleic acids according to the present invention are also those which without the degeneration of the genetic code would hybridise with one of the inventive nucleic acids and the nucleic acids coding for the amino acid sequence of the herein disclosed polypeptides and in particular the fusion proteins, such as for example represented as SEQ. ID. No. 1, SEQ. ID. No. 9, SEQ. ID. No. 11 and/or SEQ. ID. No. 13 to 16.

[0144] The inventive process for determining a compound, which influences the effect of a translation product of one of the inventive nucleic acids, can also be a process for screening a compound library. Such compound libraries are preferably libraries of low-molecular compounds. Basically, procedure is such that the translation product of one of the inventive nucleic acids is brought into contact with a compound in a system, whereby the system displays the effect of said translation product and thus an effect of the compound on the translation product or reflects it in the form of a detectable signal. This effect can be expressed for example in a modified function with respect to strength, substrate specificity (recognition, binding, transport) and/or receptor specificity or affinity or the membrane association, such as for example in signal forwarding. The effect could likewise have an influence on enzymatic processes inside or outside a cell. The effect can be checked both in the cell-free, in the cellular system, in the cell culture and/or in transgenic animal models, i.e. in vitro, in vivo and in situ.

[0145] As far as reference is made to tumors or hyperplasias in terms of the inventive process or applications, these are to be understood as all tumors or hyperplasias herein disclosed in connection with the inventive nucleic acids.

[0146] With the present nucleic acid sequences therefore new possibilities open up both for diagnosis and for therapy of the herein described illnesses, as well as investigation of the mechanisms associated with the occurrence in these illnesses, in particular with goitre and thyroid gland tumors or thyroid gland carcinomas. In particular there is the possibility through knowledge of the sequences to indirectly or directly use diagnostic and therapeutic means suitable on the molecular level in the sense of—pharmaceutical—compositions and drugs.

[0147] The inventive nucleic acid sequences can be used in a manner familiar to the expert in the area for realising suitable diagnostically and therapeutically usable means in the above sense as well as kits and processes.

[0148] Nucleic acids are understood to be both DNA sequences as well as RNA sequences, including hybrids thereof, including derivatives derived therefrom with altered solid such as PNA and LNA. This also includes the nucleic acids being present as single-strand, double-strand or as triple structure.

[0149] It can likewise be provided that the strandedness of the DNA, i.e. whether it is present for example single-strand or double-strand, changes over the length of the nucleic acid sequence.

[0150] In particular it can also be provided that the inventive nucleic acid sequence is present not completely, but as a fragment. Preferably the fragments are 5′-or 3′-terminal fragments of the inventive nucleic acids.

[0151] Furthermore it is within the scope of the present disclosure that the nucleic acid sequences can be present in mutated form or as alleles, as they occur in different populations. Mutation is understood herein to mean all mutations known to the specialist, which can occur inside a nucleic acid sequence, including point mutations and non-point mutations, i.e. inversions, insertions and deletions.

[0152] In particular translocations, which lead to obtaining or loss of nucleic acid sequences and/or particularly cause fusion genes.

[0153] In particular under the aspect of interaction of the inventive nucleic acid with other nucleic acids the criterion of hybridising should be employed herein, which is generally recognised in the technology. It is recognised that through choice of appropriate hybridising conditions the stringency of hybridising inside a specific region can be changed and therefore hybridising of the inventive nucleic acid sequences of nucleic acid sequences is possible, whereof the degree of deviation can fluctuate from the incomplete corresponding, i.e. complementary sequence.

[0154] Nucleic acid sequence in the inventive sense should also be understood a that sequence which would hybridise with one of the inventive sequences, if it were not the degeneration of the genetic code. This means that with a view to the open in-frame present in the inventive nucleic acid sequence, or the open in-frame, the latter can be translated into an amino acid sequence using the genetic code. As a result of degeneration of the genetic code it is possible however, based on such an amino acid sequence obtained, to again obtain a nucleic acid sequence using the genetic code, which is so different that per se it can possibly no longer hybridise with the nucleic acid sequence employed to determine the amino acid sequence.

[0155] Based on the herein disclosed nucleic acids it is possible for the specialist to generate a suitable antisense-nucleic acid, in particular antisense RNA, which can interact with the inventive nucleic acid sequences. On account of this interaction direct influencing of the processes involving the nucleic acid sequences is possible. This interaction can take place for example on the level of transcription as well as on the level of translation.

[0156] Nucleic acid sequences should herein also generally be understood as nucleic acid sequences, which can be obtained through isolating from the abovementioned tissue preferably in situ or ex vivo, for example from corresponding cell, tissue or organ cultures.

[0157] Here however corresponding nucleic acid sequences should also be understood, which can be isolated from gene banks, in particular human gene banks and still more preferably gene banks of the human chromosome 2, 3 and 7, or can be taken from the latter. In addition to this herein the term nucleic acid sequences should also comprise those nucleic acids which can be produced by means of suitable synthesis techniques, including polymerase chain reaction, and other biochemical and chemical synthesis methods known in the state of the art.

[0158] The inventive sequences can also be present in modified form.

[0159] Modification here is understood inter alia as fragmenting, insertion, deletion and reversion of (partial) sequences of the inventive nucleic acid sequences. This also includes the insertion of other nucleic acid sequences. These nucleic acid sequences can for example code for specific domains, as spacers and/or serve as elements for translation and transcription regulation.

[0160] Furthermore, the inventive nucleic acids can be modified such that they comprise sequences or molecules, which enable interaction with other molecules. This can take place for example in the form of a binding point to a solid carrier or a sequence which determines binding to a nucleic acid-binding protein.

[0161] Further still, the inventive nucleic acid sequences can be marked. Here marking should basically be understood as direct and indirect marking.

[0162] Marking can take place using the markings known in the prior art as well as marking methods and includes in particular radioactive, non-radioactive and fluorescence marking. Non-radioactive markings comprise, inter alia, the using of digoxygenin, avidin, streptavidin and biotin.

[0163] Vector should be understood herein in particular as recombinant vectors, as they are known in the technology.

[0164] The term of vector as used herein includes, inter alia, viral vectors, such as for example adenoviral or retroviral vectors and phage systems, as well as plasmide vectors, including cosmide vectors, and artificial chromosomes, which can be used in prokaryontic and/or eukaryontic systems.

[0165] Apart from the inventive nucleic acid sequences the inventive vectors may comprise ongoing elements, known in the prior art. The respective elements, such as for example promoters, terminators and enhancers, are selected according to the respective host cell system in a manner known to the specialist. In particular the use of a suitable eukaryontic promoter and of an inducible promoter is preferred. Aside from the use of the abovementioned elements singly or in any combination it is also still within the scope of the present invention for such elements to be contained in this type of vectors, which result in at least the inventive nucleic acid sequence, or a part thereof, becoming integrated into the genome of the host cell system.

[0166] It is also within the scope of the present invention that at least one of the abovementioned elements in the in-frame (“in-frame”) is connected to at least one open in-frame of the inventive nucleic acid sequences, and it is quite particularly advantageous if the transcription rate of the special open in-frame is controlled by means of an additionally introduced promoter, whereby the promoter is then arranged typically at a suitable distance and “in-frame” to the open in-frame.

[0167] Thereby it can also be provided that an open in-frame of the inventive nucleic acid sequences, preferably under the abovementioned conditions, has a signal sequence which enables translocation of the gene product coded by the open in-frame via a membrane, and if required as a result of this enables further modification of the gene product. Such signal sequences include those for transport of the synthesised protein to the endoplasmatic reticulum, Golgi apparatus, to lysosomes, to cell organelles, such as mitochondria and chloroplasts, as well as to the cell core. Such possible traversing of different cellular compartments allows posttranslational modification and thus if required ongoing beneficial forming of the gene product.

[0168] Apart from signal sequences such a construct may also contain additional nucleic acid sequences, which result in the gene product of an open in-frame of the inventive nucleic acid sequences forming a fusion protein, whereby the fused part of a domain can correspond to another protein and e.g. serves to detect the gene product of the open in-frame of the inventive sequences, or the interaction with other molecules or structures in the biological system, whereby the biological system is preferably the cell.

[0169] Apart from the abovementioned and the further advantages originating for the specialist from the description of the inventive nucleic acid sequences these are also inherent to the polypeptides which can be derived from the abovementioned nucleic acid sequences or coded by the latter. These polypeptides can be derived for one directly from an open in-frame of the inventive nucleic acid sequence, or can be produced by an inventive vector expressed in a host organism in a manner familiar to the specialist. In the process the host organism is first typically transformed with the inventive vector, the host organism is augmented and the polypeptide is obtained from the host organism, or in the case of secretion of same in the medium is obtained from the latter.

[0170] Apart from direct use of the inventive polypeptides and of the nucleic acids coding them for influencing the—cellular—events in thyroid gland tissue the latter can also be used in cleaning, for example via affinity chromatography, of other components involved in cellular events, or for manufacture of suitable antibodies, which, inter alia, for their part can then be employed for therapeutic and/or diagnostic purposes. In this way inter alia interaction partners of the inventive polypeptides can therefore be detected or isolated.

[0171] Depending on the existing requirements in each case, such as posttranslational modification or desired degree of purity and the like, either a prokaryontic or an eukaryontic host organism can be of advantage in the manufacture of the inventive polypeptides in a host organism.

[0172] The inventive polypeptides can be modified in a suitable manner. Modification should be understood, inter alia, as fragmenting, in particular shortening, of the molecule.

[0173] Modification in this sense also includes marking of the polypeptide. The latter can take place by means of both high-molecular and low-molecular compounds and includes radioactive, non-radioactive and fluorescence marking.

[0174] Marking can also be present for example in the form of phosphorylising or glycosylising of the protein.

[0175] Corresponding marking methods or modification methods are known in the technology (see e.g. Protein Methods, 2nd ed., D. M. Bollag et al., Wiley Liss, Inc., New York, N.Y., 1996) and are recorded herein in full by reference.

[0176] Modification is understood according to the present invention to also mean any form of posttranslational modification, as known to experts, in particular proteolytic processing of the polypeptide, attaching or separating of radicals at the N-terminus, acetylising of the N-terminus, myristoylising of the N-terminus, attaching of glycosyl-phosphatidyl radicals, farnesyl radicals or geranylgeranyl radicals to the C-terminus, N-glycosylising, O-glycosylising, attaching of glycosaminoglycan, hydroxylising, phosphorylising, ADP ribosylising and formation of disulfide bridges.

[0177] It is also within the scope of the present invention that the inventive polypeptides come from or are derived from mutation(s), in particular amino acid mutation(s) from an inventive polypeptide. Amino acid mutation is understood both as mutation, in which an amino acid is exchanged for an amino acid similar in side chain (conservative mutation), for example I to L or D to E, as well as mutation, in which one amino acid is exchanged for another amino acid, without this exchange having a disadvantageous effect on the function of the coded polypeptide (still mutation). The function of the coded polypeptide can be checked by a suitable assay. Suitable functional assays for DRIP, i.e. for apoptotic procedures, are known to specialists in the field (see e.g. Lizard G. al., Ann Pathol 1997 Mar; 17 (1): 61-6.).

[0178] Inventive cells are used to bring about substantial advantages. These comprise inter alia the manufacture of corresponding nucleic acid sequences or gene products derived therefrom.

[0179] In particular the insertion of the inventive nucleic acid sequences in the genome of a cell is of particular significance, for example for further study of the influence of such sequences, in particular in the cellular environment. At the same time gene dose effects and the like can be examined or utilised for diagnostic and/or therapeutic purposes. A state, in which based on diploid cells only one chromosome contains one or more of the inventive nucleic acid sequences, and preferably inserted in the position corresponding to their position in band 2p21-22, and the second chromosome has no chromosome translocation including the chromosomal band 2p21-22, seems quite particularly advantageous. Such cells can serve for example as positive and/or negative control in a diagnostic preparation.

[0180] It is within the scope of the present invention that apart from the respective inventive translation product or the nucleic acid(s) coding therefor, as described herein, other means can also be employed to generate or also to suppress the effects originating from the respective translation product or the nucleic acid coding therefor. Such means can be detected for example within the scope of a so-called screening process. In a first step one or more so-called candidate compounds is prepared. Candidate compounds in the sense of the present invention are those compounds whereof the suitability should be established in a test system for treating the herein disclosed illnesses, in particular functional disturbances of the thyroid gland and/or hyperplasias of the thyroid gland and/or thyroid gland tumor, or should be employed as diagnostic means for the diagnosis of same. If the candidate compound in the described test system displays a corresponding effect, it represents a corresponding, i.e. in principle suitable means for treatment of these illnesses. In a second step the candidate compound is brought into contact with a (translation product) expression system or with a (translation product) activity system. A translation product-expression system is thus an expression system, which shows the expression of the translation product, whereby the extent of the expression can be fundamentally changed. A translation product activation system is essentially an expression system, whereby less is placed on the expression of the translation product than on its activity or its activation status and its capacity for influence. It should be noted here that the translation product as such does not have to be the result of an actual expression procedure, but also can be added to the corresponding activity system already as a polypeptide or protein. In this case it is established in concrete terms whether the activity of the translation product alters under the influence of a candidate compound. At the same time, independently of the presence of the respective concrete expression system or activity system, basically both a reduction in the expression or activity and also an increase in the expression or activity take place.

[0181] Typically the expression system and/or the activity system is an in vitro preparation, such as for example a cell extract or a fragment of a cell extract such as for example a cell core extract. But such a preparation can also be a (bio)chemical preparation more or less precisely defined with respect to the relevant component. A translation product expression system in terms of the present invention can however also be cell, preferably a cell of the thyroid gland, of hyperplasias of the thyroid gland or of the cells forming a thyroid gland tumor.

[0182] An observation to what extent an increase or decrease of the expression system takes place can be established on one level of the expression, i.e. for example by increasing or decreasing the quantity of the nucleic acid coding for the translation product, in particular the mRNA, or also of the translation product produced in the expression system under the influence of the candidate compound, i.e. of the respective protein. The required techniques such as for example a process for quantifying mRNA are known to the specialist in the field and for example described in Sambrook et al. (Sambrook, Joseph: Molecular Cloning: A laboratory manual/J. Sambrook; E. F. Fritsch; T. Maniatis Cold Spring Harbor, NY: Cold Spring Harbor Laboratory Press),19XX1. ed. T. Maniatis, Thomas P.: Molecular Cloning; 3rd edition: Joseph Sambrook and David W. Russell; Literary references ISBN 0-87969-309-6 ISBN 0-87969-576-5 ISBN 0-87969-577-3 1.-2. ed., 4. [Dr.]. -1989). Moreover, the specialist is also familiar with a process for determining the content of the quantity of translation product, for example through use of suitable antibodies.

[0183] Antibodies can be manufactured according to the generally known process described for example in Current Protocols (“Current Protocols in Protein Science”, published by Coligan J. E.; Dunn B. M., Hidde L. P. Speicher D. W., Wingfield P. T.; John Wiley & Sons). It is also possible that within the scope of the expression system the resulting translation product bears marking. Such suitable marking is for example marking with His6 (Janknecht R et al. (1991) Proc Natl Acad Sci USA 88 (20): 8972-6).

[0184] In the case of the translation product activity system the increase in activity or decrease in activity of the translation product is typically tested in a functional assay, as has been described already in context with the definition of the mutated translation products, or more precisely the mutated inventive polypeptides.

[0185] Placing candidate compounds and expression system or activity system in contact takes place as a rule by addition of a preferably aqueous solution of the candidate compound to the corresponding reaction system, i.e. the expression system or the activity system, which are also designated herein generally as test systems. The aqueous solution can preferably be a buffer solution.

[0186] The use of candidate compounds occurs as a rule such that in each test in each case only a single candidate compound is used in the corresponding test system. At the same time it is also within the scope of the present invention that corresponding tests are performed parallel and in a high throughput process.

[0187] The last step of the inventive screening process, consisting of determining whether the expression or activity of the translation product or a nucleic acid coding therefor is altered under the influence of the candidate compound, as a rule takes place by comparing the behaviour of the test system without addition of the candidate compound to that of the test system by addition of the candidate compound. Preferably, the candidate compound is contained in a compound library. Every compound library is basically conceivable independent of the compound class as a compound library. Suitable compound libraries are for example libraries of small molecules. It is however also within the scope of the present invention that other compound classes are used as small molecules, such as for example peptides, proteins, antibodies, anticalins and nucleic acids, in particular also functional nucleic acids.

[0188] At the same time it is within the scope of the present invention that the inventive translation product or the nucleic acid coding therefor can be sued as target molecules for generating the abovementioned compound classes such as in particular peptides, proteins, antibodies, anticalins and functional nucleic acids. The corresponding compounds, i.e. peptides, proteins, antibodies, anticalins and functional nucleic acids, can then be utilised in the inventive screening process.

[0189] It is further within the scope of the present invention that those compounds, i.e. peptides, proteins, antibodies, anticalins and functional nucleic acids, which are generated against the inventive translation product or the nucleic acid(s) coding therefor, are used as means in the sense of the present invention, i.e. as means for the therapy of functional disturbances of the thyroid gland and/or hyperplasias of the thyroid gland and/or thyroid gland tumors or as corresponding diagnostic agents.

[0190] Peptides and in particular binding peptides in the sense of the present invention are preferably those proteins and peptides, which bind to the inventive translation product or a or the interaction partner, in particular the natural interaction partner, of the inventive translation product, preferably in biological systems, in particular in the thyroid gland or hyperplasias of the thyroid gland or thyroid gland tumors and the cells forming them. The same applies also for the antibodies, anticalins, functional nucleic acids and small molecules described herein in connection with the inventive use. At the same time each member of the abovementioned compound classes can preferably interact with the inventive translation product or a nucleic acid coding therefor and therefore influence the corresponding activity of the translation product or the coding nucleic acid. The conditions, under which such interacting takes place, are familiar to specialists and correspond to those conditions under which interacting should occur in practice. Preferably, the conditions are physiological conditions, preferably conditions prevalent in a biological system of the illnesses described herein.

[0191] It is however also within the scope of the present invention to create or to use such members or undergo a corresponding screening process, which with the interaction partner, in particular the natural interaction partner of the inventive translation product, or a nucleic acid coding therefor, interact and influence the expression or activity of the interaction partner or the nucleic acid coding therefor. Here, too, the term “influence” designates either an increase or decrease in expression, of the extent of expression or the activity, as generally disclosed herein.

[0192] As a result of the interaction of said members with the interaction partners of the inventive translation product or the nucleic acid coding therefor therefore the cascade of reactions coupled with the translation product is interrupted, so that the naturally observed effect of the inventive translation product or of the nucleic acid coded thereby is interrupted, which can be used within the scope of the herein disclosed therapy or diagnosis concerning functional disturbances of the thyroid gland and/or hyperplasias of the thyroid gland and/or thyroid gland tumors.

[0193] These peptides, hereinbelow also designated as binding peptides or binding proteins, can be screened or manufactured using a process known form the prior art, such as for example phage display. The techniques are known to specialists in the field. At the same time the production of such peptides typically proceeds such that a peptide library is laid out, for example in the form of phages, and this library is put in contact with a target molecule, in the present case for example with a translation product or the natural interaction partner of the translation product of the inventive nucleic acids. The binding peptides are then typically removed as complex along with the target molecule from the non-binding members of the library. It is within the scope of the knowledge of specialists in this area that the binding properties depend at least to a certain extent on the trial conditions present in each case, such as for example salt content and the like. After separation of the peptides with a higher or stronger affinity binding to the target molecule from the non-binding members of the library or the target molecule, in the present case for example the inventive translation product, the latter can then be characterised. If required, prior to characterising an amplification step is necessary, for example by increasing the coding phages corresponding to the peptide or the peptides or protein(s). The characterising comprises preferably sequencing the proteins binding on the translation product or its natural interaction partner, depending on which of both molecules was used as target molecule in the phage-display screening process. The peptides are basically not limited with respect to their length. Typically, peptides with a length of 8-20 amino acids are obtained or used in such processes, however. The size of the libraries is 10²-10¹⁸, preferably 10⁸-10¹⁵ different peptides. A special form of peptides binding on target molecules is represented by anticalins, such as described for example in the German patent application DE 197 42 706.

[0194] In the light of the herein disclosed technical idea antibodies can then also be produced against a gene product, in particular an inventive translation product such as a polypeptide, or the inventive nucleic acid sequences. In this case also therefore the advantages familiar to the specialist generally result from the presence of antibodies against chemical compounds, in particular in in vitro and in vivo applications. In particular, with the antibodies for example purifying of the inventive compounds, i.e. the inventive nucleic acids and/or the inventive polypeptides or translation products is possible, whereof detection, but also influencing of the biological activity, including biological availability, of the compounds, is directed at that of the antibodies, both in situ, and ex vivo, in vivo and/or in vitro. In more precise terms, the gene products can be specifically detected in particular using monoclonal antibodies, or on the cellular level interaction of the gene products. or nucleic acid sequence with other cellular components can be influenced and therefore specifically intervene in the cellular events. Depending on the effect of the respective compounds, at which the antibody is directed and at which it develops its effect in the observed system, stimulating and inhibiting effects can be achieved in principle.

[0195] Antibodies are understood herein both as polyclonal antibodies and as monoclonal antibodies. However, monoclonal antibodies are particularly preferable on account of increased specificity. However, there are those cases where the purity or specificity of polyclonal antibodies is adequate or the plurality of specificities realised in polyclonal antibodies and other properties can be used to advantage.

[0196] The manufacture and use von antibodies is described for example in Antibodies: A Laboratory Manual (E. Harlow & D. Lane, Cold Spring Harbor Laboratory, NY, 1988), of which the disclosure is recorded herein by reference.

[0197] It is also within the scope of the invention that the antibody can also be a single-chain antibody.

[0198] It is also within the scope of the present invention that the antibody is fragmented, in particular shortened. This includes the antibody being referenced to a major extent, as long as there is the antibody-specific property, i.e. binding to a defined epitope. Referencing is particularly of advantage when the corresponding antibody is to be employed at the cellular level, since it has improved permeations and diffusion properties relative to a complete antibody.

[0199] In addition still other forms of the modification are provided, which are known to the specialist in the field and are described for example in Antibodies: A Laboratory Manual (E. Harlow & D. Lane, Cold Spring Harbor Laboratory, NY, 1988). In general it can be affirmed that the modifying of antibodies can occur in principle similarly to how that of polypeptides and, to a specific extent, nucleic acids, and the abovementioned on this subject also applies for the inventive antibody.

[0200] A further compound class, which can be used within the scope of the inventive screening process as also with the inventive manufacture of drugs and diagnostic agents, is functional nucleic acids. Functional nucleic acids should be understood herein in particular as aptamers, aptazymes, ribozymes, spiegelmers, antisense oligonucleotides and RNAi.

[0201] Aptamers are D-nucleic acids, either single-strand or double-strand, based on RNA or DNA, which bind specifically on a target molecule. The manufacture of aptamers is described for instance in European Patent EP 0 533 838. The procedure is as follows:

[0202] A mixture of nucleic acids, i.e. potential aptamers, is prepared, whereby each nucleic acid comprises a segment of at least eight successive, randomised nucleotides and this mixture is brought into contact with the target, in the present case therefore with a translation product, in particular an inventive translation product, nucleic acid(s) coding therefor, interaction partners of the translation product, in particular natural interaction partners, and/or nucleic acid(s) coding for the latter, whereby nucleic acids, which bind on the target, are separated from the rest of the candidate mixture if required on the basis of increased affinity, are compared to the affinity of the candidate mixture, and the resulting nucleic acids binding on the target are amplified. These steps are repeated a number of times, so that by the end of the process nucleic acids binding specifically on the respective target or target molecule, even the so-called aptamers, are obtained. It is within the scope of the present invention that these aptamers can be stabilised, for instance by introducing specific chemical groups, which are known to specialists in the field of aptamer development. Aptamers are currently already being used therapeutically. It is also within the scope of the present invention that the resulting aptamers are used for target validating and as messenger substances for the development of drugs, in particular of small molecules.

[0203] The manufacture or production of spiegelmers is based on a fundamentally similar principle, which can be developed as target molecule within the scope of the present invention on the basis of an inventive translation product, the nucleic acid(s) coding therefor, the translation product interaction partners, in particular natural interaction partners, and/or the nucleic acid(s) coding for the latter.

[0204] The manufacture of spiegelmers is described for instance in international patent application Wo 98/08856. spiegelmers are L-nucleic acids, i.e. they comprise L-nucleotides, and are characterised substantially in that in biological systems they have very high stability and at the same time, comparable to aptamers, specifically interact with a target molecule or can bind on the latter. With the manufacture of spiegelmers the procedure is such that a heterogeneous population of D-nucleic acids is generated, which population is brought into contact with the optical antipodes of the target molecules, in the present case therefore for example with the D-enantiomer of the naturally occurring L-enantiomer of a translation product, then those D-nucleic acids are separated out which do not interact with the optical antipodes of the target molecules, the D-nucleic acids, interacting with the optical antipode of the target molecules, are determined, if required separated out and sequenced and then L-nucleic acids are synthesised, which are identical in their sequence with those sequence(s) previously detected for the D-nucleic acid(s). Similar to the process for manufacture of aptamers it is also possible in this case to enrich or produce suitable nucleic acids, i.e. spiegelmers, by repeating the steps, which bind the translation product, one or more of its especially natural interaction partners, depending on which of the abovementioned compounds is used as target molecule, or a nucleic acid coding therefor.

[0205] Another form of the functional nucleic acids, which can be used according to the present invention, are so-called aptazymes. Aptazymes are described for example by Piganeau, N. et al. (2000), Angew. [Applied] Chem. Int. Ed., 39, no. 29, pages 4369-4373. At the same time these are a specific form of aptamers, which are characterised in that apart from the aptamer portion, which binds specifically on the target molecule, in the present case an inventive translation product or an interaction partner thereof, they can still contain a ribozyme portion with the result that after binding of the target molecules of the aptamer portion the aptazyme of the ribozyme portion is activated and this results in splitting of a nucleic acid functioning as substrate of the ribozyme portion of the aptazyme. With corresponding configuration of the ribozyme substrate a change in the fluorescence as a result of a change in the spatial arrangement of a fluorescence donor relative to a fluorescence acceptor can be observed for example on the ribozyme substrate. In this respect aptazymes are suited in particular for application within the scope of target validation concerning a translation product and its interaction partner as well as diagnostics agents in the sense of the present invention. In similar fashion is also therapeutic use is possible to the extent that it is disclosed in connection with the herein described ribozymes.

[0206] Common to the abovementioned compound classes is the fact that they preferably bind on the respective protein or polypeptide, i.e. the or a, preferably an inventive, translation product or the interaction partner thereof, or are generated against the latter. It is however also within the scope of the present invention that these compound classes, and in particular the functional nucleic acids, have as target molecule the nucleic acid(s) coding for the abovementioned preferably inventive proteins or polypeptides or the inventive nucleic acids as target molecule.

[0207] An additional class of compounds, which can be produced or developed using a translation product, preferably an inventive translation product, and/or of an interaction partner thereof and in particular the nucleic acid(s) coding for these or an inventive nucleic acid, are ribozymes, antisense oligonucleotides and RNAi.

[0208] Common to all these classes of compounds is the fact that they display their effect not on the level of the translation product, i.e. on the level of the proteins (translation product and interaction partner thereof), but on the level of the nucleic acid(s) coding for the respective protein, in particular the mRNA or the mRNA coding for a translation product, which codes for an interaction partner of the translation product. The corresponding genomic DNA or the corresponding cDNA is also suited as target molecule.

[0209] Ribozymes are catalytically active nucleic acids which are preferably constructed from RNA and comprise two partial areas. The first partial area is responsible for catalytic activity, whereas the second part is responsible for specific interaction with a target nucleic acid. When it comes to forming an interaction between the target nucleic acid and the second part of the ribozyme, typically by hybridising of base areas substantially complementary to one another, the catalytic part of the ribozyme can hydrolyse the target nucleic acid either intramolecular or intermolecular, whereby the latter preferably is, in the event that the catalytic effect of the ribozyme is a phosphodesterase activity. As a result there is, if required, further decomposition of the coding nucleic acid, whereby the titre of the target molecule both on the nucleic acid and also the protein level and in intracellular and extracellular fashion can be reduced and therefore a therapeutic preparation for the treatment of functional disturbances of the thyroid gland and/or hyperplasias of the thyroid gland and/or thyroid gland tumors is provided. Ribozymes, whereof the use and construction principles are known to the specialists in the field, are described for instance in Doherty and Doudna (Ribozyme structures and mechanisms. Annu. Rev. Biophys. Biomol. Struct. 2001; 30: 457-75) and Lewin and Hauswirth (Ribozyme gene therapy: applications for molecular medicine. Trends Mol. Med. 2001, 7: 221-8). With respect to a pharmaceutical composition, which comprises a ribozyme in addition to the pharmaceutically acceptable carrier or the use of the inventive ribozyme as drug, and in particular for treatment of functional disturbances, hyperplasias and tumors of the thyroid gland, it is also possible that the ribozyme is constructed such that it works specifically on one or more of the inventive nucleic acid sequences and therefore also controls the expression or translation at a cellular level, which is of significance in particular in the therapeutic and also the diagnostic aspect. At the same time and on account of the fact that ribozymes display intramolecular and intermolecular catalytic effects, it can also be provided that the inventive nucleic acid sequences are modified such that areas are split off by ribozyme activity of the changed area. Also there is particularly the therapeutic possibility which is possible for the specialist to realise in light of the now available sequence information.

[0210] Ribozymes, similar to the inventive nucleic acid sequences themselves, are particularly advantageous, though not only when they are introduced to the effector cell by means of gene therapy for example. However it is also conceivable that corresponding modifications are made ex vivo and such modified cells are then available for re-implantation, either allogenic or autogenic. The manufacture and use of ribozymes is disclosed in Ribozyme Protocols (Philip C. Turner, Ed., Humana Press, Totowa, N.Y., 1997) and is included herein. This applies basically for each of the herein described functional nucleic acids.

[0211] The use of antisense oligonucleotides for manufacture of a drug or diagnostic agents in the sense of the present invention is based on a basically similar work mechanism.

[0212] Antisense oligonucleotides hybridise as a result of base complementarity typically with target RNA, normally with mRNA and thereby activate RNaseH. RNaseH is activated both by Phosphodiester as well as phosphorothioate-coupled DNA. Phosphorodiester-coupled DNA is quickly broken down however with the exception of phosphorothioate-coupled DNA by cellular nucleases. These resistant, non-naturally occurring DNA derivatives do not inhibit RNaseH when they are hybridised with RNA. In other words, antisense polynucleotides are effective only as DNA-RNA hybrid complex. Examples for such antisense oligonucleotides are found inter alia in U.S. Patent U.S. Pat. No. 5,849,902 or U.S. Pat. No. 5,989,912. In principle the essential concept of the antisense oligonucleotides comprises providing a complementary nucleic acid against certain RNA. In other words, based on the knowledge of the nucleic acid sequence of a translation product or its interaction partner(s), in particular the respective mRNA, suitable antisense-oligonucleotides can be produced by base complementarity, which result in a breakdown in nucleic acid, preferably coding nucleic acid such as hnRNA or mRNA. This breakdown can then be detected in an expression or activity system qualitatively or quantitatively.

[0213] A further class of compounds, which can be identified, produced or used as drug or diagnostics means in the sense of the present invention, is the abovementioned RNAi. RNAi is a double-strand RNA, which permits RNA interference and typically has a length of approximately 21 to 23 nucleotides. At the same time one of the two strands corresponds to the RNA of a sequence of a or of the gene to be broken down or the corresponding mRNA. In other words, based on the knowledge of the nucleic acid(s) coding for a translation product and/or its interaction partner, in particular mRNA, a double-stranded RNA can be produced, whereby one of the two RNA strands is substantially complementary to said nucleic acid(s) coding for the translation product and/or its interaction partner, preferably mRNA, and this then leads to breakdown of the corresponding coding nucleic acid and thus to a reduction of the titre of the respective translation products, i.e. proteins. The production and use of RNAi as drug or diagnostic means is known to specialists in the field and described for instance in international patent applications WO 00/44895 and WO 01/75164.

[0214] With respect to the effective mechanisms of the abovedescribed classes of compounds, namely ribozymes, antisense oligonucleotides and RNAi, it is therefore within the scope of the present invention, apart from the inventive translation product, i.e. the respective polypeptide or protein, and in particular its natural interaction partner(s), to use either directly or as target molecule, and either fully or partially the nucleic acid(s) in each case coding therefor, in particular the corresponding RNA, cDNA or genomic DNA, for manufacture of a drug for treatment of functional disturbances of the thyroid gland and/or hyperplasias of the thyroid gland and/or thyroid gland tumors or for the manufacture of diagnostic means for diagnosis of the abovementioned illnesses or functional disturbances and for monitoring the course of the illness or the applied therapy.

[0215] With use of the inventive translation product, the nucleic acid coding therefor, of the translation product interaction partner(s), in particular the natural interaction partner(s), and/or the nucleic acid(s) coding for these as target molecule for the manufacture or development of a drug for treatment or therapy of functional disturbances of the thyroid gland and/or hyperplasias of the thyroid gland and/or thyroid gland tumors, as also for the manufacture and/or development of agents for diagnosis of same, libraries of small molecules can also be used. Here too the target molecule is put in contact with a library and those members of the library, which bind thereon, are separated if required from the other members of the library or the target molecule and optionally characterised further. Here too the characterising of the small molecules takes place according to processes known to the specialists in this area, so e.g. the compound is identified and the molecular structure is determined. The libraries comprise as few as two and as many as up to several hundred thousand members.

[0216] In connection with the different herein disclosed classes of compounds, which can be used as therapeutic means or diagnostic means according to the present invention, it is an aspect that certain classes bind directly with a translation product or its interaction partner interact or on the latter. It is however also within the scope of the present invention that said compounds of the different classes, in particular when these are peptides, antibodies, anticalins, aptamers, aptazymes and spiegelmers, block the interaction partner of the translation product by one more or less specific interaction for the translation product.

[0217] In this respect the term of use of a translation product herein is also to be understood to the extent that it comprises the use of one or more of the translation product interaction partner(s), such as for instance receptors and transcription and translation factors. The herein described processes are then to be modified to the extent that instead of the translation product protein or the nucleic acid coding for them, an interaction partner thereof is used in the different selection methods, assays, screening processes or manufacturing methods.

[0218] Within the scope of the present invention interaction partners of a translation product, in particular of an inventive translation product, in particular natural interaction partners, are understood as those molecules and structures, with which said translation product interacts. At the same time in particular those molecules and structures are comprised, with which the protein interacts in a biological system under normal and/or also under pathological conditions. A suitable interaction partner of DRIP is for example DR5 (Engl. death receptor 5), such as is described for example in Hymowitz S. G., Christinger H. W., Fuh G., Ultsch M., O'Connell M., Kelley R. F., Ashkenazi A., de Vos A. M., OMIM, Protein, Structure Triggering cell death: the crystal structure of Apo2L/TRAIL in a complex with death receptors. Mol Cell. 1999 Oct; 4 (4): 563-71. Ashkenazi A, Dixit V M. Related Articles, Nucleotide, Protein Apoptosis control by death and decoy receptors. Curr. Opin. Cell Biol. 1999 April 1 (2) :255-60. Review, or Mitsiades N, Poulaki V, Mitsiades C. S., Koutras D. A., Chrousos G. P. Related Articles, Apoptosis induced by FasL and TRAIL/Apo2L in the pathogenesis of thyroid diseases. Trends Endocrinol. Metab. 2001 Nov; 12 (9) :384-90. Review.

[0219] With respect to makeup of the inventive kits for diagnosis and/or therapy of functional disturbances, hyperplasia and tumors of the thyroid gland, i.e. generally the herein described illnesses, it is to be noted that the precise configuration of such a kit, i.e. which components are included explicitly, is known to the specialist in this area, and in particular is possible in light of the above embodiments with respect to the effect or applicability of the herein disclosed inventive nucleic acid sequences and their translation product. The inventive kit is in any case comprised of at least one of the inventive elements, which is selected from the group, which comprises the inventive nucleic acid(s), the vector, the polypeptide, the cell, the antibody, the ribozyme and at least one of the different compounds of the different classes, as were characterised herein, in particular the antibodies, peptides, proteins, anticalins, small molecules, aptamers, spiegelmers, ribozymes, aptazymes, antisense oligonucleotides and RNAi, specifically for the inventive nucleic acids or inventive translation products and the interaction partners thereof, in particular the natural interaction partners, and the nucleic acid in each case coding therefor, in each case preferably in their inventive shaping. Further of the inventive kits, which can be contained individually or in combination in the inventive kit, are selected from the group, comprising buffer, negative controls, positive controls and instructions for use.

[0220] Typically the individual compounds or constituents are contained in the kit in dry or liquid form, preferably portioned for the individual case. The kit can preferably be used for determining functional disturbances of the thyroid gland and/or hyperplasias of the thyroid gland and/or thyroid gland tumors. With respect to the use of inventive cells their use is comprised in particular as reimplant or as positive and/or negative control in corresponding diagnostic or therapeutic preparations within the scope of the present invention.

[0221] With the inventive process for proving functional disturbances and hyperplasias and/or tumors of the thyroid gland, also in the sense of carcinomas and goitre, it is possible that the thyroid gland material is present in situ, ex vivo, in vivo or in vitro. The term “thyroid gland material”, as used herein, designates in particular material, preferably cellular material of the thyroid gland in its normal and/or pathogenic state. The term thyroid gland material thus also comprises material of thyroid glands with a functional disturbance, of hyperplasias of the thyroid gland, of tumors of the thyroid gland, including carcinomas and goitre. Determining whether a functional disturbance, hyperplasia and/or tumor is present takes place by comparing the effect of the used inventive agent or agents on the thyroid gland material to be examined with its effect on “normal” thyroid gland tissue. Further exemplary embodiments of the inventive process will emerge for the specialist on the basis of the herein contained disclosure.

[0222] The above embodiments with respect to the different embodiments and the thus realisable advantages also apply in essence for the inventive drugs, and in particular for those means for diagnosis and/or therapy and/or prevention of functional disturbances, hyperplasias and/or tumors of the thyroid gland in the form of the inventive sequence(s), or their use, in the form of the inventive vector, or its use, in the form of the inventive polypeptide, or its use, in the form of the inventive cell, or its use, in the form of the ribozyme, or its use, disclosed herein. The same applies also for the compounds manufactured or selected according to the present invention from the group comprising binding peptides, anticalins and functional nucleic acids, whereby it is common to these compounds that they are directed against the inventive nucleic acid sequences or the polypeptides coded thereby or their interaction partner(s) or the nucleic acid coding therefor, i.e. against these are manufactured or selected as target molecules. The corresponding drugs can have a content of one or more of the abovementioned agents or compounds.

[0223] The same applies also for the inventive pharmaceutical compositions. At the same time it is possible that apart from the optional pharmaceutically acceptable carrier a pharmaceutical composition comprises only one of the listed compounds. Alternatively, it is also within the scope of the invention that the pharmaceutical composition has several of the abovementioned compounds apart from the pharmaceutically acceptable carrier.

[0224] Pharmaceutically acceptable carriers are to be understood herein as all carriers known to the specialist, which typically can be selected depending on the form of application. A pharmaceutically acceptable carrier can, inter alia, be water, buffer solutions, alcoholic solutions and the like.

[0225] With respect to the inventive processes for manufacturing primers, it is pointed out that these are those which allow specific depiction of the inventive nucleic acid sequences, or parts thereof.

[0226] In the inventive process for displaying an inventive nucleic acid sequence the inventive nucleic acid sequences or sequences corresponding thereto or their complementary sequences using inventive primers as primer for a polymerase chain reaction can be used in all their different designs, from whichever source. The design of suitable primers and the carrying out of polymerase chain reactions is disclosed for example in PCR & PCR 2: A practical approach (M. J. McPherson, P. Quirke and G. R. Taylor, Eds., IRL Press, Oxford, England 1991, and M. J. McPherson and B. D. Hames, Eds., IRL Press, Oxford, England 1995) and is included herein.

[0227] The inventive nucleic acids, including inventive nucleic acid sequences, comprise in particular the herein disclosed DRIP gene, which is designated herein also as DRIP in special configurations of the inventive DRIP and the nucleic acids coding for the inventive fusion proteins.

[0228] Nucleic acids or nucleic acid sequences according to the present invention are in particular also the following nucleic acids, which comprise the nucleic acid sequences designated herein with “SEQ. ID. No.”, those nucleic acids or nucleic acid sequences, which partially or fully comprise the nucleic acid sequences designated hereinbelow with “SEQ. ID. No.”, and comprise further nucleotides, in particular on the 5′- and/or 3′ end, those nucleic acids, which contain further nucleotides in addition to the sequences designated herein with “SEQ. ID. No.”, in the case of the inventive DRIP sequence or gene supplemented by further nucleotides from the BAC RP11 339H12 or RP11 204D19. The relative arrangement of the abovementioned clone is illustrated in FIG. 12.

[0229] It is also within the scope of the present invention that parts or fragments of the inventive nucleic acids as such are designated and/or used as inventive nucleic acids. This applies in particular to the use of the inventive nucleic acids for manufacture or generating drugs on the basis of RNAi, also designated as siRNA, ribozymes, aptazymes and antisense molecules. This is fundamental in the construction principle of the above compound classes, which are substantially identical or complementary to the inventive nucleic acid, in particular to the sequences specified in the sequence protocol. The length of the area substantially identical or complementary to the inventive nucleic acids is preferably 15 to 49, preferably 15 to 31 and most preferably 21 to 23 nucleotides. Nucleic acids according to the present invention are thus also those parts or fragments of the inventive nucleic acids, in particular also of the sequences specified or contained in the sequence protocol, which comprise 15 to 49, preferably 15 to 30 and most preferably 21 to 23 nucleotides. The starting point for such a sequence or such a nucleic acid molecule can be at any point on the respective nucleic acid or nucleic acid sequence, preferably at a point where the number of nucleotides, which are still present to the very end of the sequence, suffices to provide the nucleotides required for the desired length area.

[0230] As used herein, designated a size order range from X to Y all lengths X, Y and all whole-number lengths in between.

[0231] So comprises for example the length area 21 to 23 nucleotides die lengths von 21, 22 and 23 nucleotides.

[0232] Furthermore, inventive nucleic acids are also the herein disclosed primers and in particular those other fragments, which are individualised or can be individualised with respect to their sequence herein.

[0233] The inventive nucleic acids further comprise those nucleic acids coding for a polypeptide, whereby the polypeptide has or comprises a sequence, as designated herein with one or more of the “SEQ. ID. No.”, in particular SEQ. ID. No 2, 10. 17 and/or 5 to 8. Finally inventive nucleic acids are also those which comprise one or more exons and/or one or more of the introns of one or more of the herein disclosed inventive nucleic acids, in particular of the nucleic acids designated with den SEQ. ID. Nos. 1 and 3 and 4 and 9 and 11 to 16.

[0234] The inventive polypeptides, herein also designated in brief as polypeptides, are in particular translation products of one or more of the inventive nucleic acids or fragments thereof. At the same time the translation products can be present fully or abbreviated. These translation products are designated herein either generally as translation product, independent of the number, or as inventive translation product. Translation products or polypeptides in the sense of the present invention are in particular those parts of the corresponding polypeptides, which are part of a domain structure, in particular of such a domain as is present extracellular in a cellular system. This applies also for the fusion proteins, which can likewise be used as described hereinabove fully or abbreviated according to the present invention.

[0235] The inventive nucleic acids, in particular for the inventive DRIP, which in the prior art as such fragmentary already described are, can also be characterised or represented by the following nucleic acid sequences: The genomic sequence of 2p21-22, beginning on the BAC RP11 339H12- (AC010883), continuing via BAC RP11 183F15 (AC092838) or BACRP11 1069E24, ends with the last bp of BACRpll 204D19 (AC92615). The sequences are published with the access numbers (accession numbers of the GenBank databank) AC010883(RP11 339H12), AC092838(RP11 183F15), AC92615 (Rpll204D 19). The length of this genomic sequence is 506295 base pairs.

[0236] The herein disclosed sequences comprise human sequences in particular, showing:
[0237] SEQ. ID. No. 1 mRNA of the DRIP-FUS Ib splice variant mRNA,
[0238] SEQ. ID. No. 2 the DRIP-FUS Ib splice variant, the coding sequence (CDS) and therefore the amino acid sequence of the first fusion protein, whereby its DRIP portion comprises exons 1 to 28,
[0239] SEQ. ID. No. 3 the genomic sequence range, in which the FUS I component rests on chromosome 3,
[0240] SEQ. ID. No. 4 the genomic sequence range, in which the FUS II component rests on chromosome 7,
[0241] SEQ. ID. No. 5 the coding sequence (CDS) of DRIP and therefore the amino acid sequence, whereby DRIP comprises exons 1 to 38,
[0242] SEQ. ID. No. 6 the coding sequence (CDS) and therefore the amino acid sequence of the first fusion protein, FUS I, whereby its DRIP portion comprises exons 1 to 28,
[0243] SEQ. ID. No. 7 the coding sequence (CDS) and therefore the amino acid sequence of the splice variant of the first fusion protein (FUSIa), whereby its DRIP portion comprises exons 1 to 28,
[0244] SEQ. ID. No. 8 the coding sequence (CDS) and therefore the amino acid sequence of the second fusion protein (FUS II), whereby its DRIP portion comprises exons 1 to 28,
[0245] SEQ. ID. No. 9 the splice variant mRNA of the DRIP-FUS IIa fusion gene from thyroid gland tumor,
[0246] SEQ. ID. No. 10 the amino acid sequence of the splice variant of the DRIP-FUS IIa protein, for the SEQ. ID. Nos. 1 to 2 and 6 to 10 designated DRIP the part of DRIP, which comprises exons 1 to 28 and SEQ. ID. No. 5 that part which comprises exons 1 to 38.
   Furthermore,
[0247] SEQ. ID. No. 11 shows herein the DRIP-mRNA sequence comprising exons 1 to 38,
[0248] SEQ. ID. No. 12 the genomic sequence of DRIP comprising exons 1 to 38,
[0249] SEQ. ID. No. 13 the mRNA sequence of the DRIP-FUS I gene, whereby this comprises exons 1 to 28 of the DRIP gene as well as exons I, Ia and II of FUS I from the chromosome 3p25 range,
[0250] SEQ. ID. No. 14 the mRNA sequence of a splice variant of the DRIP-FUSI gene, whereby this comprises exons 1 to 28 of the DRIP gene as well as exon II of FUS I from the chromosome 3p25 range,
[0251] SEQ. ID. No. 15 FUSI gene mRNA sequence of the DRIP-FUSII gene, whereby this comprises exons 1 to 28 of the DRIP gene and exon A of FUS II from the chromosome 7p 15 range,
[0252] SEQ. ID. No. 16 FUSI gene mRNA sequence of the DRIP splice variant, whereby this comprises exons 1 to 26 and 29 to 38 of the DRIP gene,
[0253] SEQ. ID. No. 17 FUSI gene coding sequence (CDS) of FUSI gene DRIP splice variant and therefore FUSI gene amino acid sequence, whereby DRIP comprises exons 1 to 26 and 29 to 38.

[0254] It is within the scope of the present invention that the use, disclosed herein for one or more of the inventive polypeptides, proteins, nucleic acids or the compounds derived therefrom, as disclosed herein, in particular also a compound, such as small molecules, binding peptides, antibodies, anticalins and functional nucleic acids, contained within the scope of a screening process, which uses the latter individually, in combination or as fragment(s), is basically also disclosed in each case for the other abovementioned molecules or compounds.

[0255] The invention is explained hereinbelow by means of the figures, examples and the sequence protocols, from which further characteristics, embodiments and advantages of the invention will emerge, in which:

[0256] FIG. 1 is a schematic illustration of the genomic position of the breakpoint region on chromosome 7p 15;

[0257] FIG. 2 is a schematic illustration of the genomic position of the breakpoint region on chromosome 3p25;

[0258] FIG. 3 is a schematic illustration of the genomic position of the breakpoint region on (2) in the cell line S325T/SV40 which has the fusion transcript DRIP-FUS I;

[0259] FIG. 4 is a schematic illustration of the genomic position of the breakpoint region on (2) in the cell line S533T/SV40 which has the fusion transcript DRIP-FUS II;

[0260] FIG. 5 is a karyogram of the primary tumor S 533, which has a translocation t (2; 7) (p21;pl5);

[0261] FIG. 6 is a karyogram of the cell line S 533 T/SV 40 produced from the primary culture S 533;

[0262] FIG. 7a is a metaphase of the cell line S325T/SV40 with a t (2; 3; 20) (p21; ql 1. 2; p25) after G banding;

[0263] FIG. 7b is a metaphase of the cell line S325T/SV40 with a t (2; 3; 20) (p21; qll. 2; p25) after FISH with BAC 1069E24, whereby the hybridising signals are localised on chromosome 2, the (2) and the (20), marked with arrows;

[0264] FIG. 8 is the result of the proof of the break point in the cell line S 533/TSV40 which leads to the fusion transcript DRIP-FUS II;

[0265] FIG. 9 is a karyogram and FISH results of the cell line S 325/TSV40;

[0266] FIG. 10 is proof of the first and second fusion protein by means of RT-PCR;

[0267] FIG. 11 is the result of Northern-Blot analysis with use of a DRIP- specific probe;

[0268] FIG. 12 schematically illustrates the genomic position of DRIP relative to the break point cluster in different benign thyroid gland tumors and hyperplasias with 2p21 changes, whereby the translocation break at the cell lines S 325/TSV 40 and S 533/TSV 40 is localised in intron 28;

[0269] FIG. 13 schematically illustrates the DRIP-mRNA with its splice variant;

[0270] FIG. 14 is a schematic illustration of the three forms of the fusion transcript DRIP-FUSI; and

[0271] FIG. 15 is a schematic illustration of the two forms of the second fusion gene DRIP-FUS II.

[0272] In addition to the sequences specified in the sequence protocol the following is disclosed in reference thereto.

SEQ. ID. No. 1

[0273] SEQ. ID. No. 1 represents the fusion gene DRIP-FUS Ib (splice variant); proven in the cell line S325T/SV40 with a t (2; 20; 3)(p21; ql 1.2; p25).

[0274] The following positions of the mRNA sequence positions correspond to the described exons:

| Position on | | |
|---|---|---|
| the mRNA | | (no. of |
| seq | Exon no. | bp) |
| 1 . . . 108 | exon01 | 108 |
| 109 . . . 208 | exon02 | 100 |
| 209 . . . 303 | exon03 | 95 |
| 304 . . . 434 | exon04 | 131 |
| 435 . . . 583 | exon05 | 149 |
| 584 . . . 616 | exon06 | 33 |
| 617 . . . 665 | exon07 | 49 |
| 666 . . . 853 | exon08 | 188 |
| 554 . . . 948 | exon09 | 95 |
| 949 . . . 1169 | exon10 | 221 |
| 1170 . . . 1861 | exon11 | 692 |
| 1862 . . . 2040 | exon12 | 179 |
| 2041 . . . 2196 | exon13 | 156 |
| 2197 . . . 2319 | exon14 | 123 |
| 2320 . . . 2443 | exon15 | 124 |
| 2444 . . . 2595 | exon16 | 152 |
| 2596 . . . 2506 | exon17 | 211 |
| 2807 . . . 2942 | exon18 | 136 |
| 2943 . . . 3079 | exon19 | 137 |
| 3080 . . . 3238 | exon20 | 159 |
| 3239 . . . 3396 | exon21 | 158 |
| 3397 . . . 3506 | exon22 | 110 |
| 3507 . . . 3639 | exon23 | 133 |
| 3640 . . . 3753 | exon24 | 114 |
| 3754 . . . 3876 | exon25 | 123 |
| 3877 . . . 3968 | exon26 | 92 |
| 3969 . . . 4058 | exon27 | 90 |
| 4059 . . . 4190 | exon28 | 132 |
| 4191 . . . 4308 | DRIP-FUS I; | 118 |
| 4309 . . . 4473 | DRIP-FUS I; | 165 |
| 4474 . . . 4731 | DRIP-FUS I; | 258 |

SEQ. ID. No. 3

[0275] SEQ. ID. No. 3 represents the genomic sequence of chromosome 3p25, as it is contained apart from the DRIP sequence in the nucleic acid according to SEQ. ID. No. 13 and 14. The genomic sequence comprises in this case both exon I and also exon II of chromosome 3p25, whereby exon I takes up the nucleotide positions 81174 to 81291 and exon II the nucleotide positions 85616 to 85873 of SEQ. ID. No. 3. The genomic structure was taken from the BAC clone RP 11-167M22.

SEQ. ID. No. 4

[0276] SEQ. ID. No. 4 represents the genomic sequence range of FUS II exon A and A1 of chromosome 7p15, as it is part of the second fusion gene. The genomic sequence was obtained from the BAC clone RP 111-370L16. The exon A corresponds to the positions 7686 to 8949 of the genomic sequence according to SEQ. ID. No. 4.

SEQ. ID. No. 5

[0277] SEQ. ID. No. 5 represents the coding sequence (CDS) of DRIP and therefore the corresponding peptide, whereby DRIP comprises exons 1 to 38. It comprises a total of 1953 amino acids.

SEQ. ID. No. 6

[0278] SEQ. ID. No. 6 represents the coding sequence (cds) and therefore the amino acid sequence of the first fusion protein DRIP-FUS I, whereby its DRIP portion comprises exons 1 to 28. It comprises a total of 1387 amino acids.

SEQ. ID. No. 7

[0279] SEQ. ID. No. 7 represents the coding sequence (CDS) and therefore the amino acid sequence of the splice variant of the first fusion protein, whereby its DRIP portion comprises exons 1 to 28. It comprises a total of 1353 amino acids.

SEQ. ID. No. 8

[0280] SEQ. ID. No. 8 represents the coding sequence (CDS) and therefore the amino acid sequence of the second fusion protein, whereby its DRIP portion comprises exons 1 to 28. It comprises a total of 1353 amino acids.

SEQ. ID. No. 9

[0281] SEQ. ID. No. 9 represents the fusion gene DRIP-FUS IIa (splice variant); proven in the cell line S533T/SV40 with a t (2; 7) (p21;p15). The sequence length is 5580 bp.

[0282] The exons (here features) are localised as follows:

[0283] Features

| Array | Exon No. | No. of base pairs |
|---|---|---|
| exon 1 . . . 108 | Exon01 | 108 |
| exon 109 . . . 208 | Exon02 | 100 |
| exon 209 . . . 303 | Exon03 | 95 |
| exon 304 . . . 434 | Exon04 | 131 |
| exon 435 . . . 583 | Exon05 | 149 |
| exon 584 . . . 616 | Exon06 | 33 |
| exan 617 . . . 665 | Exon07 | 49 |
| exon 666 . . . 853 | Exon08 | 188 |
| exon 854 . . . 948 | Exon09 | 95 |
| exon 949 . . . 1169 | Exon10 | 221 |
| exon 1170 . . . 1861 | Exon11 | 692 |
| exon 1862 . . . 2040 | Exon12 | 179 |
| exon 2441 . . . 2196 | Exon13 | 156 |
| exon 2197 . . . 2319 | Exon14 | 123 |
| exon 2320 . . . 2443 | Exon15 | 124 |
| exon 2444 . . . 2595 | Exon16 | 152 |
| exon 2596 . . . 2806 | Exon17 | 211 |
| exon 2807 . . . 2942 | Exon18 | 136 |
| exon 2943 . . . 3079 | Exon19 | 137 |
| exon 3080 . . . 3238 | Exon20 | 159 |
| exon 3239 . . . 3396 | Exon21 | 158 |
| exon 3397 . . . 3506 | Exon22 | 110 |
| exon 3507 . . . 3639 | Exon23 | 133 |
| exon 3640 . . . 3753 | Exon24 | 114 |
| exon 3754 . . . 3876 | Exon25 | 123 |
| exon 3877 . . . 3968 | Exon26 | 92 |
| exon 3969 . . . 4058 | Exon27 | 90 |
| exon 4059 . . . 4190 | Exon28 | 132 |
| exon 4191 . . . 4316 | Chr. 7p15 | DRIP-FUS II Exon A1 |
| exon 4317 . . . 5580 | Chr. 7p15 | DRIP-FUS II Exon A |

[0284] SEQ. ID. No. 10 represents the coding sequence (CDS) and therefore the amino acid sequence of the splice variant of the second fusion protein DRIP-FUSIIa, whereby its DRIP portion comprises exons 1 to 28. It comprises a total of 1366 amino acids.

SEQ. ID. No. 11

[0285] SEQ. ID. No. 11 represents the mRNA of DRIP comprising exons 1 to 38. The length of mRNA is 6090 bp. The open in-frame (ORF) begins with position 133 and ends with position 5994. The following primers, which hybridise at different places of the mRNA, can be used as proof of mRNA.

| | |
|---|---|
| Primer Name | Sequence |

| | |
|---|---|
| DRIPVRU1 | 5′ATGGGAGAACCAAATCGTCATCCAAGCATG 3′ |
| DRIPVRL2 | 5′TCAACATGCCGCTTCTGTTCTTGGAAGAGTTAA 3′ |
| DRIPVRU3 | 5′TTTCCGGCAAAACCACATTCATGGGACACT 3′ |
| DRIPVRL4 | 5′TACTGGGGCAGGCCTGGCACCTTGAAG 3′ |
| DRIPVRU5 | 5′TGGCCGTCGTTGAAGTCCTCACCAGT 3′ |
| DRIPVRL6 | 5′GCCAGCCGGACTTTGAGAGGAGACAGAAG 3′ |
| DRIPVRU9 | 5′GCTTCAGGCAGCAGCAGCATTTCCA 3′ |
| DRIPVRL10 | 5′ATTGGGATGAGGCCTTCAGGGGATGA 3′ |
| DRIPVRL10 | 5′ATTGGGATGAGGCCTTCAGGGGATGA 3′ |
| DRIPVU11 | 5′CCTGCCCCAGTACCTCCAGAGCCTCAC 3′ |
| DRIPVL12 | 5′GAACTCCTTTGGGGTCAGATGGACACAGTG 3′ |
| DRIPVU13 | 5′ACTGCATGGACCCTGGTGAGTGGCT 3′ |
| DRIPVL14 | 5′GCATGTGGTGGGAAATGACTTTGGAAG 3′ |
| DRIPVU15 | 5′CTCAGCACAAGCACCAAACCATACGACTGT 3′ |
| DRIPVU16 | 5′AGAGTAAATCCAAACGTGAACCAGAGAATGAGT 3′ |
| DRIPVRU17 | 5′GGCTGGGAGAAAATATTATTCCTTATGTTG 3′ |
| DRIPVU18 | 5′GTCTGGGCAGTGCGAAATTCATCCAC 3′ |
| DRIPVU19 | 5′AGACTCTACGCTTCCCCGATGGATGGT 3′ |
| DRIPL20 | 5′CAGGCGCGTATCTCTGAACAATGCTCTAAG 3′ |
| DRIPVL21 | 5′GAAGGGTGCTGTTTGGTTAACTCATTCTC 3′ |
| DRIPVU22 | 5′GCGAATAGCTAGAGCTCATGGACATCT 3′ |
| DRIPVU23 | 5′ATTTTTACCAAGGTTTTAAGCGATGATGA 3′ |
| DRIPVL24 | 5′AGTGAGCCGGTGCATTTGGACAAG 3′ |
| DRIPVU25 | 5′CTCAGACGCCGACGTGCACGAGTGACTA 3′ |
| DRIPVL26 | 5′ACGAGAAGTAAAACGGTGCATAGCCTCAGGT 3′ |
| DRIPVU27 | 5′GGATATCTTAGCAGGCATTTATCTTTCTTTGAGTCT 3′ |
| DRIPVL28 | 5′ATATTTTGCCATATGGGAGAATCGGAAGTC 3′ |
| FOSTSWI14187 | 5′ATTTATGTTCAACATGTTTCCTGC 3′ |
| RVSTSWI14187 | 5′TGCAGAATCGAGGCAGTTAA 3′ |

SEQ. ID. No. 12

[0286] The SEQ. ID. No. 12 represents the genomic sequence of the DRIP gene on chromosome 2p21-22.

[0287] The length of the genomic DNA of DRIP, which comprises exons 1 to 38, is 365186 bp.

[0288] The following exon positions can be specified in genomic DNA:

| Position in genomic | Exon No. | No. of exon |
|---|---|---|
| 1 . . . 108 | Exon01 | 08 |
| 3623.3722 | Exon02 | 100 |
| 3993 . . . 4087 | Exon03 | 95 |
| 5085 . . . 5215 | Exon04 | 131 |
| 9037 . . . 9185 | Exon05 | 149 |
| 9305 . . . 9337 | Exon06 | 33 |
| 9590 . . . 9638 | Exon07 | 49 |
| 14110 . . . 14297 | Exon08 | 188 |
| 17431 . . . 17525 | Exon09 | 95 |
| 18796 . . . 19016 | Exon10 | 221 |
| 21011 . . . 21702 | Exon11 | 692 |
| 23046 . . . 23224 | Exon12 | 179 |
| 24176 . . . 24331 | Exon13 | 156 |
| 25528 . . . 25650 | Exon14 | 123 |
| 29217 . . . 29340 | Exon15 | 124 |
| 35653 . . . 35804 | Exon16 | 152 |
| 39483 . . . 39693 | Exon17 | 211 |
| 43699 . . . 43834 | Exon18 | 136 |
| 44113 . . . 44249 | Exon19 | 137 |
| 46670 . . . 46828 | Exon20 | 159 |
| 54722 . . . 54879 | Exon21 | 158 |
| 66890 . . . 68159 | Exon22 | 1270 |
| 68050 . . . 68159 | Exon22 | 110 |
| 87258 . . . 87390 | Exon23 | 133 |
| 90303 . . . 90416 | Exon24 | 114 |
| 97083 . . . 97205 | Exon25 | 123 |
| 110713 . . . 110804 | Exon26 | 92 |
| 165736 . . . 165825 | Exon27 | 90 |
| 167807 . . . 167938 | Exon28 | 132 |
| 197899 . . . 198067 | Exon29 | 169 |
| 251801 . . . 251916 | Exon30 | 116 |
| 275498 . . . 275592 | Exon31 | 95 |
| 302825.303204 | Exon32 | 380 |
| 303816 . . . 303934 | Exon33 | 119 |
| 304270 . . . 304342 | Exon34 | 73 |
| 308977 . . . 309130 | Exon35 | 154 |
| 316142 . . . 316273 | Exon36 | 132 |
| 363156 . . . 363325 | Exon37 | 170 |
| 364695 . . . 365186 | Exon38 | 492 |

[0289] The following primers, which hybridise at different places of the mRNA, can be used as proof of mRNA.

| | |
|---|---|
| Primer Name | Sequence |

| | |
|---|---|
| DRIPVRU1 | 5′ATGGGAGAACCAAATCGTCATCCAAGCATG 3′ |
| DRIPVRL2 | 5′TCAACATGCCGCTTCTGTTCTTGGAAGAGTTAA 3′ |
| DRIPVRU3 | 5′TTTCCGGCAAAAGCACATTCATGGGACACT 3′ |
| DRIPVRL4 | 5′TACTGGGGCAGGCCTGGCACCTTGAAG 3′ |
| DRIPVRU5 | 5′TGGCCGTCGTTGAAGTCCTCACCAGT 3′ |
| DRIPVRL6 | 5′GCCAGCCGGACTTTGAGAGGAGACAGAAG 3′ |
| DRIPVRU7 | 5′CTGGCAAATTCCATGGTTCTGTCTTGAAGTGA 3′ |
| DRIPVRL8 | 5′CAATGGAACCAGAACATGAAGCCAAGCAGTCT 3′ |
| DRIPVRU9 | 5′GCTTCAGGCAGCAGCAGCATTTCCA 3′ |
| DRIPVRL10 | 5′ATTGGGATGAGGCCTTCAGGGGATGA 3′ |
| DRIPVU11 | 5′CCTGCCCCAGTACCTCCAGAGCCTCAC 3′ |
| DRIPVL12 | 5′GAACTCCTTTGGGGTCAGATGGACACAGTG 3′ |
| DRIPVU13 | 5′ACTGCATGGACCCTGGTGAGTGGCT 3′ |
| DRIPVL14 | 5′GCATGTGGTGGGAAATGACTTTGGAAG 3′ |
| DRIPVU15 | 5′CTCAGCACAAGCACCAAACCATACGACTGT 3′ |
| DRIPVU16 | 5′AGAGTAAATCCAAACGTGAACCAGAGAATGAGT 3′ |
| DRIPVRU17 | 5′GCCTGGGAGAAAATATTATTCCTTATGTTG 3′ |
| DRIPVU18 | 5′GTCTGGGCAGTGCGAAATTCATCCAC 3′ |
| DRIPVU19 | 5′AGACTCTACGCTTCCCCGATGGATGGT 3′ |
| DRIPL20 | 5′CAGGCGCGTATCTCTGAACAATGCTCTAAG 3′ |
| DRIPVL21 | 5′GAAGGGTGCTGTTTGGTTAACTCATTCTC 3′ |
| DRIPVU22 | 5′GCGAATAGCTAGAGCTCATGGACATCT 3′ |
| DRIPVU23 | 5′ATTTTTACCAAGGTTTTAAGCGATGATGA 3′ |
| DRIPVL24 | 5′AGTGAGCCGGTGCATTTGGAGAAG 3′ |
| DRIPVU25 | 5′CTCAGACGCCGACGTGCACGAGTGACTA 3′ |
| DRIPVL26 | 5′ACGAGAAGTAAAACGGTGCATAGCCTCAGGT 3′ |
| DRIPVU27 | 5′GGATATCTTAGCAGGCATTTATCTTTCTTTGAGTCT 3′ |
| DRIPVL28 | 5′ATATTTTGCCATATGGGAGAATCGGAAGTC 3′ |
| DRIPVU29 | 5′TAGCATCCTGGACTAATTCAGCCATAGAAG 3′ |
| DRIPVU30 | 5′GACGGTGGAGCAGGTAAAAGAAATAGG 3′ |
| DRIPVL31 | 5′GCAGCTGGGGAGTGTGGACAAC 3′ |
| DRIPVU32 | 5′TAATTCATCACCATTGCCAAGTAAGGATAG 3′ |
| DRIPVL33 | 5′GGACATCAAA.AGGAGCTTCTCTACCAC 3′ |
| DRIPVU34 | 5′AGTGGAGAGCGGGAGACGAATG 3′ |
| DRIPVL35 | 5′AAGAATAGGATGGGGGTTGGTGAG 3′ |
| DRIPVU36 | 5′AGCCTAACGGACAGCCTGAATGGGA 3′ |
| FOSTSWI14187 | 5′ATTTATGTTCAACATGTTTCCTGC 3′ |
| RVSTSWT14187 | 5′TGCAGAATCGAGGCAGTTAA 3′ |

[0290] The sequences of exons 1 to 38 can be taken from SEQ. ID. No. 11.

SEQ. ID. No. 13

[0291] SEQ. ID. No. 13. comprises the mRNA sequence of the DRIP-FUS I gene, whereby the latter comprises exons 1 to 28 of the DRIP gene and exons I, Ia and II of chromosome 3p25.

[0292] The total length of mRNA is 4558 bases. The arrangement of exons 1 to 28 of that part of mRNA, originating from DRIP, corresponds to the arrangement of exons 1 to 28 in DRIP, as is also shown in SEQ. ID. No. 11 and 12. Exon I of chromosome 3p25 comprises nucleotides 4191 . . . 4308 and exon II of chromosome 3p25 comprises nucleotides 4309 . . . 4566 of the sequence according to SEQ. ID. No. 13. The fusion gene DRIP-FUS I was proven in the cell line S325T/SV 40 with a t(2; 20; 3) (p21;qll. 2; p25). The following primers were used as proof of the nucleic acid according to SEQ. ID. No. 13:

| | |
|---|---|
| Primer | Sequence |

| | |
|---|---|
| DRIPVRU1 | 5′ATGGGAGAACCAAATCGTCATCCAAGCATG 3′ |
| DRIPVRU9 | 5′GCTTCAGGCAGCAGCAGCATTTCCA 3′ |
| DRIPVRL10 | 5′ATTGGGATGAGGCCTTCAGGGGATGA 3′ |
| DRIPVU15 | 5′CTCAGCACAAGCACCAAACCATACGACTGT 3′ |
| DRIPVU16 | 5′AGAGTAAATCCAAACGTCAACCAGAGAATGACT 3′ |
| DRIPVRU17 | 5′GCCTGGGAGAAAATATTATTCCTTATGTTG 3′ |
| DRIPVU18 | 5′GTCTGGGCAGTGCGAAATTCATCCAC 3′ |
| DRIPVU19 | 5′AGACTCTACGCTTCCCCGATGGATGGT 3′ |
| DRIPL20 | 5′CAGGCGCGTATCTCTGAACAATGCTCTAAG 3′ |
| DRIPVL22 | 5′GAAGGGTGCTGTTTGGTTAACTCATTCTC 3′ |
| DRIPVU22 | 5′GCGAATAGCTAGAGCTCATGGACATCT 3′ |
| DRIPVU23 | 5′ATTTTTACCAAGGTTTTAAGCGATGATGA 3′ |
| DRIPVL24 | 5′AGTGAGCCGGTGCATTTGGAGAAG 3′ |
| DRIPVU25 | 5′CTCAGACGCCGACGTGCACGAGTGACTA 3′ |
| DRIPVL26 | 5′ACGAGAAGTAAAACGGTGCATAGCCTCAGGT 3′ |
| DRIPVU27 | 5′GGATATCTTAGCAGGCATTTATCTTTCTTTGAGTCT 3′ |
| DRIPVL28 | 5′ATATTTTGCCATATGGGAGAATCGGAAGTC 3′ |
| FUSVL01 | 5′TGCTTTGGGAGCCAGGTCACTGAGTTACTAC |
| FUSVL02 | 5′ACTGCTTTGGGAGCCAGGTCACTGAGT |
| FUSVL03 | 5′TCCAGGGAAATTCACTGCTTTGGGAGCCA |

SEQ. ID. No. 14

[0293] SEQ. ID. No. 14 shows the mRNA sequence of a splice variant of the DRIP-FUSI gene, proven in the cell line S325T/SV40 with a t (2; 20; 3) (p21; qll. 2; p25), whereby this comprises exons 1 to 28 of the DRIP gene and exon II, with position 4191 to 4448 of the MRNA sequence, of chromosome 3p25. This splice variant was obtained from the same cell line as described in connection with SEQ. ID. No. 13. The mRNA in this case has a length of 4448 bases. The genomic sequence of the part of the nucleic acids according to SEQ. ID. No. 13 and 14, which are contributed by DRIP to the respective fusion gene, correspond to the ranges, as disclosed in connection with SEQ. ID. No. 12.

SEQ. ID. No. 15

[0294] SEQ. ID. No. 15 shows the mRNA sequence of the second fusion gene, which is herein also designated as DRIP-FUS II, which for one comprises exons 1 to 28 of the DRIP gene and secondly comprises exon A of #7pl5. The length of mRNA is 5454 bases, whereby the first 4190 bases correspond to those of mRNA of DRIP and bases 4191 to 5454 correspond to exon A of #;7pl5. The corresponding primers are suitable for proof of exons 1 to 28 of the DRIP gene, as were described in connection with SEQ. ID. No. 13. The following primers can be used for proof of the sequence portion, which is attributed to #;7p15 at the following nucleotide positions of SEQ. ID. No. 16:

| | |
|---|---|
| Primer Name | Sequence |

| | |
|---|---|
| FUSIIL01 | 5′GGTAGCGGGAGCAATCACAAAACTGTAA |
| FUSIIL02 | 5′CTCTTCTTTTGATAGGACAGCCCTTGTTCTGA |
| FUSIIL03 | 5′GACCGCTTCTTGCAGAGGCTGAGAGTC |

SEQ. ID. No. 16

SEQ. ID. No. 16

[0295] SEQ. ID. No. 16 shows the mRNA sequence of the DRIP splice variant. The open in-frame (ORF) begins with position 133 and ends with position 5772.

[0296] Complementary to the explanations made in the overview of the figures the following is also revealed with reference to the individual figures.

[0297] FIG. 1 is a schematic illustration of the genomic position of the breakpoint region on chromosome 7, more precisely #;7pl5. The break point is significant for providing that part of the fusion transcript DRIP-FUS II, which stems from chromosome 7. The result was determined on the cell line S533/TSV40. The length of the breakpoint region is not defined in terms of the telomer. Exon A, as in DRIP-FUS II, can be obtained from the BAC clone RP 11-379L16 (AC 079780). Exon A and A1 is illustrated on an enlarged scale relative to the BAC clone in FIG. 1a).

[0298] FIG. 2 is a schematic illustration of the genomic position of the breakpoint region on chromosome 3, more precisely #;3p25. The break point is significant for providing that part of the fusion transcript DRIP-FUS I, which stems from chromosome 3. The results were determined on the cell line S325T/SV40. The length of the breakpoint region is not defined in terms of telomer. The exons 1 Ia and II of chromosome 3, which are contained in the fusion transcript DRIP-FUS I, can be obtained from the BAC clones RP 11-167M22 (AC093174) and RP11-33519 (AC091492). The exons I Ia and II are illustrated in FIG. 2a) on en enlarged scale relative to the BAC clone.

[0299] FIG. 3 is a schematic illustration of the genomic position of the breakpoint region on (2) with cell line S325T/SV40. which has the fusion transcript DRIP-FUS I. At the same time FIG. 3a) shows the description of the chromosomal sections on (2) and FIG. 3b) shows the genomic structure of DRIP-FUS I, whereby exon I (Ex I), exon Ia and exon II (Ex II) are arranged at the 3′ end and are represented on an enlarged scale. As illustrated in FIG. 3c), the size of the break point range between exon I (#;3p25) and exon 28 (#;2p21) is not defined and therefore a length detail to adjoining BAC clones is not possible. The BAC clones are taken from the BAC library RP 11 and can be identified by their identification number and the gene bank access number.

[0300] FIG. 4 is a schematic illustration of the genomic position of the breakpoint region on (2) with cell line S533T/SV40. which has the fusion transcript DRIP-FUS II. At the same time FIG. 2a) shows the description of the chromosomal sections on (2) and FIG. 2b) shows the genomic structure of DRIP-FUS II, whereby exon A (Ex A) and exon AI(ExAl) are arranged at the 3′ end and are represented on an enlarged scale. As illustrated in FIG. 4c), the size of the break point range between exon A(#;7p15) or exon AI and exon 28 #;2p21) is not defined and therefore a length detail to adjoining BAC clones is not possible. The BAC clones are taken from the BAC library RP 11 and can be identified by their identification number and the gene bank access number.

[0301] FIG. 5 shows the karyogram of the primary tumor S 533 produced according to standard methods, which has a translocation t (2; 7) (p21;pl5). The translocations are characterised by arrows.

[0302] FIG. 6 shows the karyogram of the cell line S 533/TSV 40 produced from the primary culture S 533 according to standard methods. At the same time it is evident that the translocations evident in the primary tumor also remain intact in the cell line established from the primary tumor.

[0303] FIG. 8 shows the result of the proof of the break point in the cell line S 533/TSV40. which leads to the fusion transcript DRIP-FUS II. At the same time a so-called double FISH is carried out on the cell line S 533/TSV40 with the BAC clones RP 11-339H12 and RP 11-204 D19. The result is illustrated in the right partial figure. At the same time GTG dyeing of the band n-pattern of the chromosomes was carried out. The results of the double FISH are in accord with the result of the GTG dyeing, as shown by the arrows in both diagrams pointing to the break points.

[0304] FIG. 9 shows a karyogram and FISH results of the cell line S 325/TSV40. The karyogram was produced according to standard methods familiar to specialists in the field or the FISH according to standard processes. FIG. 9a) illustrates a part of the Giemsa-dyed karyotype and the suitable ideogram of the thyroid gland adenoma cell line S 325/TSV40. The cell line exhibits a translocation t (2; 20; 3) (p21;q11. 2; p25). In each case the normal state is illustrated to the left and the derived chromosomes 2, 20 and 3 are illustrated to the right. FIG. 9b) shows a metaphase of the cell line S 325/TSV40 with translocation t (2; 20; 3) (p21;q11. 2; p25) after Giemsa dyeing; chromosomes 2, the (2) and the (20) are indicated by arrows; FIG. 9c) shows the same metaphases according to FISH with BAC 1069E24, whereby the hybridising signals are arranged on chromosome 2, the (2) and the (20) are marked by arrows.

[0305] FIG. 10 shows the result of a RT-PCR, whereby the fusion transcript of the first fusion protein DRIP-FUS I was obtained from the cell line S 325 and the fusion transcript of the second fusion protein DRIP-FUS II was obtained from the cell line S533. The arrows show the position of the respective transcripts, whereby in the case of DRIP-FUS 1 the three splice variants were obtained and with DRIP-FUS II two splice variants were obtained. The trace marked with M is the reference trace, which contains different length standards.

[0306] FIG. 11 shows the result of Northern-Blot analysis using a DRIP-specific probe. For this RNA, which had been removed from the different specified tissues, was applied to a surface and hybridised with a DRIP-specific probe. The probe had a length of 880 pb and originated from exons 25 to 32 of the DRIP gene. The probe used corresponded to the primer DRIPVRU17/VRL4.

[0307] FIG. 12 shows the genomic position of DRIP relative to the break point cluster with different benign thyroid gland tumors and hyperplasias with 2p21-22 changes. The genomic sequence of DRIP can be represented by the overlapping BAC clones 339H12 (AC 010883), 183F15 (AC 092838), 1069E24 (AQ694385; AQ 703756) and 204D19 (AC 092615). The translocation break of the cell lines S 325/TSV 40 and S533/TSV 40 (herein also designated as S 533) occurs in intron 28. A break in this area results in both fusion proteins DRIP-FUS I and DRIP-FUS II.

[0308] FIG. 13 is a schematic illustration of the DRIP-mRNA whereby the DRIP-mRNA comprising 6090 bp comprises all 38 exons in all and the open in-frame (ORF) resulting therefrom has a length of 5862 bp. The ORF begins in exon 2 and extends in 3′-direction to exon 38 of the DRIP gene.

[0309] Also, a splice variant of the DRIP gene is illustrated in FIG. 13, in which exons 27 and 28 are deleted. This variant of the DRIP gene also represents an inventive nucleic acid or the peptide coded thereby represents an inventive peptide. The ORF of the splice variant comprises a total of 5640 bp and begins likewise in exon 2 and extends as far as exon 38.

[0310] FIG. 14 is a schematic illustration of three forms of the fusion transcript DRIP-FUS I. The first form comprises exons 1 to 28 of the DRIP gene and exons I and II of band 25 of chromosome 3 (herein also designated as #;3p25, or also chromosome 3p25). The length of this form is 4566 bp.

[0311] The ORF begins in exon 2 and extends as far as exon I of #;3 p25. The ORF itself is formed by 4164 bp in all according to 1388 amino acid radicals.

[0312] The second form of the first fusion transcript DRIP-FUS II comprises likewise exons 1 to 28 of the DRIP gene, however only exon II of #;3p25. This form has a length of 4448 bp, whereby the ORF again begins in exon 2 and extends as far as exon II. The ORF has a length of 4062 bp according to 1354 amino acid radicals.

[0313] The third form comprises exons 1 to 28 of the DRIP gene and exons I, Ia and II of band 25 of chromosome 3 (herein also designated as 3p25, or chromosome 3p25).

[0314] The length of this form is 4731 bp. The ORF begins in exon 2 and extends to exon I of #;3 p25. The ORF itself is formed by 4164 bp in all according to 1388 amino acid radicals.

[0315] FIG. 15 is a schematic illustration of the second fusion gene DRIP-FUS II, found in the cell line S 533/TSV40. The first fusion gene transcript DRIP-FUS II comprises 5454 bp in all and is formed by exons 1 to 28 of the DRIP gene and exon A of the band p15 of chromosome 7, which is arranged at the 3′ end of the fusion transcript. The ORF begins in exon 2 and extends partially into exon A. The ORF comprises a total of 4062 bp according to 1354 amino acid radicals.

[0316] The splice variant DRIP-FUS IIa comprises 5580 bp in all and is formed by exons 1 to 28 of the DRIP gene and exon AI and A of the band p15 of chromosome 7, which is arranged at the 3′ end of the fusion transcript. The ORF begins in exon 2 and extends partially into exon A1. The ORF comprises a total of 4101 bp according to 1367 amino acid radicals.

[0317] In so far as nothing contrary is specified herein, the specified sequences are human sequences, preferably isolated sequences and preferably isolated human sequences.

[0318] The herein disclosed sequences were reproduced in the sequence protocol and represent a substantial part of the description.

[0319] The invention is explained hereinbelow in greater detail with reference to the examples, from which further characteristics, embodiments and advantages of the present invention will emerge both from the figures and the sequence protocol.

### EXAMPLE 1

Moleculargenetic Examination of Thyroid Gland Adenomas with 2p21-

Aberrations

[0320] Structural aberrations with participation of the chromosome area 2p21 characterise a cytogenetic subgroup in the case of benign thyroid gland tumors. For identifying this break point two cell lines were established from benign thyroid gland tumors with 2p21 translocations. 18 BAC clones were added to these cell lines and an additional primary tumor for FISH studies. All break points were localised inside an area of approximately 450 kb.

[0321] The coincidence of the breakpoint region in the established cell lines and the primary tumor confirms the portability of the data on primary tumors obtained from the cell lines.

Material and Methods

[0322] After the operation a piece of tumor tissue was placed unfixed in sterile Hank's solution with 2% antibiotics (200 IU/ml Penicillin, 200 μg/ml Streptomycin). The tumor tissue was mechanically comminuted and treated for tissue exposure for 3-4 h with 0.35% collagenase (Serva, Heidelberg, Germany) for cultivating the cells. The cell suspension in an enzyme solution was centrifuged and the cell pellet was cultivated in culture medium with 20% foetal calf serum and 2% antibiotics (TC 199 with Earle's salts with 20% foetal calf serum and 2% antibiotics, 200 IU/ml Penicillin, 200 gg 7 ml Streptomycin). The chromosome preparation took place according to one of the methods described for pleomorphic adenoma of the thyroid gland (Bullerdiek et al., 1987). The karyotype description was done after the ISCN (1995).

[0323] The cell lines were established by means of transfection with an SV40 plasmide (SV40 “early region”) (Kazmierczak et al., 1990; Belge et al., 1992). Two cell lines and a primary tumor were used for FISH studies. The karyotype of one of the primary tumors has already been published (Bol et al., 1999). All tumors used in this study are characterised by clonal aberration of 2p21.

[0324] 18 BAC clones were used for cloning the break point, which were isolated from the RPCI-11 library at the Resource Centre for Genome Research (Berlin, Germany). They were isolated by means of QIAGEN Plasmid Midi kit (QIAGEN, Hilden, Germany).

[0325] The fluorescence in situ hybridising (FISH) took place in metaphases, which were banded previously for identifying the GTG chromosomes. The metaphases and the FISH were isolated according to a protocol modified by Wanschura et al. (1995) by Kievits et al. (1990).

[0326] BAC-DNA was marked with Biotin-14-dUTP and digoxigenein-14-dUTP by means of Nick translation (Gibco BRL, Life Technologies, Eggenstein, Germany). For each BAC in each case approximately 10 metaphases of the cell lines and primary tumors were analysed. Analysis of the chromosomes was performed following counter-dyeing with DAPI or propidium iodide on the Zeiss Axiophot fluorescence microscope with a FITC filter (Zeiss, Oberkochem, Germany).

[0327] The results were recorded with the Power Gene karyotyping system (PSI, Halladale, U.K.).

Results

[0328] The fluorescence in situ hybridising studies were first carried out on both the established cell lines. 18 BAC clones, which are localised in the chromosome band 2p21, were used for FISH analyses. 10 GTG-banded metaphases were analysed for each BAC. After the break point region in both cell lines was narrowed between the BAC clones 339H12 and 1069E24, the primary tumor of one of the cell lines and a further primary tumor were tested. FISH analyses demonstrate that the break points of the examined cell lines and the primary tumors are localised between the BAC clones 339H12 and 1069E24.

Discussion

[0329] In the literature to date reports have been made on 450 cytogenetic examinations of thyroid gland hyperplasias and adenomas. Approximately 20% of these lesions show chromosomal changes, divided into various subgroups. 19q 13 changes form the largest subgroup with structural chromosome aberrations (Belge et al., 1998). Clonal aberrations of chromosome 2 were likewise frequently found.

[0330] In this group the chromosome band p21 was the most frequently found aberration(Bol et al., 1999).

[0331] Frequent clonal changes in the chromosome band 2p21 show that this type of aberration forms its own cytogenetic subgroup in benign thyroid gland tumors. The molecular-genetic background of this aberration has not been known to date. Two cell lines with 2p21-translocations from benign thyroid gland tumors were established for identifying the break point and these cell lines and two primary tumors for FISH examinations were used with BAC clones from the chromosome band 2p21. The results of the FISH analyses show that the break points of the examined tumors lie between the BAC clones 339H12 and 1069E24.

[0332] In the cell line S533T/SV40 signals were established with none of the two BAC clones on derivative chromosomes. This could possibly be attributed to deletion in this chromosome segment or to excessively short overlapping sequences of both BAC clones, which show insufficiently detectable signals.

[0333] The BAC clone 339H12 has a length of 215532 bp and the length of the BAC 1069E24 is estimated as approximately 270 kb according to restriction analyses, since it was not fully sequenced.

[0334] The known overlapping sequence of both BAC clones is approximately 45728 bp, so that the maximum size of the break point region is estimated at ca. 450 kb.

Literature

[0335] Antonini P, Levy N, Caillou B, Vénuat A M, Schlumberger M, Parmentier C, Bernheim A: Numerical aberrations, including trisomy 22 as the sole anomaly, are recurrent in follicular thyroid adenomas. Genes Chromosome Cancer 8: 63-66 (1993).

[0336] Belge G, Bruckmann S, Thode B, Bartnitzke S, Bullerdiek J: Deletions of the short arm of chromosome 2 characterize a new cytogenetic subgroup of benign thyroid tumors. Genes Chromosome Cancer 16: 149-151 (1996).

[0337] Belge G, Roque L, Soares J, Bruckmann S, Thode B, Fonseca E, Clode A, Bartnitzke S, Castedo S, Bullerdiek J: Cytogenetic investigations of 340 thyroid hyperplasias and adenomas revealing correlations between cytogenetic findings and histology. Cancer Genet. Cytogenet 101: 42-48 (1998).

[0338] Bol S, Belge G, Thode B, Bartnitzke S, Bullerdiek J: Structural abnormalities of chromosome 2 in benign thyroid tumors. Three new cases and review of the literature. Cancer Genet. Cytogenet 114: 75-77 (1999).

[0339] Bondeson L, Bengtsson A, Bondeson A. G., Dahlenfors R, Grimelius L, Wedell B, Mark J: Chromosome studies in thyroid neoplasia. Cancer 64: 680-685 (1989).

[0340] Bullerdiek J, Böschen C, Bartnitzke S: Aberrations of chromosome 8 in mixed salivary gland tumors: cytogenetic findings on seven cases. Cancer Genet. Cytogenet 24: 205-212 (1987).

[0341] Johnson B A, Geha M, Blackwell T K: Similar but distinct effects of the tristetraprolin/TIS 11 immediate-early protein on cell survival. Oncogene 23: 1657-16564 (2000).

[0342] ISCN: An International system for Human Cytogenetic Nomenclature. Mitelman F. (ed. ) S. Karger, Basel (1995) Kievits T, Dauwerse J G, Wiegant J, Devilee P, Breuning M H, Cornelisse C. J., van Ommen G J B, Pearson P L: Rapid subchromosomal localization of cosmids by nonradioactive in situ hybridization. Cytogenet. Cell Genet. 53: 134-136 (1990).

[0343] Knauff J A, Elisei R, Mochly-Rosen D, Liron T, Chen X N, Gonsky R, Korenberg J R, Fagin J A: Involvement of protein kinase Cs(PKCe) in thyroid cell death. A truncated chimeric PKCs cloned from a thyroid cancer cell line protects thyroid cells from apoptosis. J Biol Chem 274: 23414-23425 (1999).

[0344] Roque L, Castedo S, Gomes P, Soares P, Clode A, Soares J: Cytogenetic findings in 18 follicular thyroid adenomas. Cancer Genet. Cytogenet 67: 1-6 (1993).

[0345] Sozzi G, Miozzo T, Cariani T C, Bongarzone I, Pilotti S, Pierotti M A, Della Porta G: A t (2; 3) (q 12-13; p 24-25) in follicular thyroid adenomas. Cancer Genet. Cytogenet 64: 38-41 (1992).

[0346] Teyssier J R, Ferre D: Frequent clonal chromosomal changes in human non-malignant tumors. Int J Cancer 44: 828-832 (1989).

[0347] Teyssier J R, Liautaud-Roger F, Ferre D, Patey M, Dufer J: Chromosomal changes in thyroid tumors.

[0348] Relation with DNA content, karyotypic features, and clinical data. Cancer Genet. Cytogenet 50: 249-263 (1990). Wanschura S, Hennig Y, Deichert U, Schoenmakers EFPM, Van de Ven W J M, Bartnitzke S, Bullerdiek J: Molecular-cytogenetic refinement of the 12ql4oqlS breakpoint region affected in uterine leiomyomas. Cytogenet Cell Genst 71: 131-135 (1995).

### EXAMPLE 2

[0349] Proof of DRIP and nucleic acids coding for DRIP in primary thyroid gland tumors and cell lines Within the scope of the present example and using the primer and processes concerning RNA isolation characterised further hereinbelow the expression of mRNA was proven in primary thyroid gland tumors and cell lines by means of PCR, whereby the intron/exon boundaries detected by databank sequence comparisons were checked. By sequencing the resulting sequences different fusion gene and splice variants thereof were surprisingly found, which represents the result of the corresponding chromosome translocation.

Standard PCR Conditions (20 μl Preparation)

[0350] Template/Matrix: cDNA (2 μl) or genomic DNA (1 μl) or BAC-DNA (1 ng)
[0351] 10×PCR buffer (−Mg) (Gibco BRL/Invitrogen): 2 μl
[0352] primer up/low:1 μl (working solution 10 μmol)
[0353] dNTP's: 1 μ1
[0354] MgC12+(Gibco BRL/Invitrogen): 0.6 μl
[0355] taq polymerase (5 U/μl) (Gibco BRL/Invitrogen): 0.25 μl
[0356] Aqua bidest: add 12.15 μl (if cDNA) or add 13.15 μl (if genomic DNA)

[0357] Cycles: 35

| | | | Transcript | |
|---|---|---|---|---|
| Primer | Localisation | Template | length | Conditions |
| Fostswi | Exon 38 | HeLa | 130 bp | Prim. denaturing: / |
| 14187/ | Exon 38 | Cell | | 95° C. |
| Rvstswi | | (gen. | | Sec. denaturing: / |
| 14187 | | DNA) | | 95° C. |
| (Acc-No: G21943) | | | | Annealing: 30 sec/ |
| | | | | 56° C. |
| | | | | Extension: 30 sec |
| | | | | 72° C. |
| | | | | Final extension: 72° C. |

Cycler: Eppendorf MastercycIer
Note.:
Gradient of 54° C. to 74° C./Template 2.5 μl

| | | | | |
|---|---|---|---|---|
| Fostswi | Exon 38 | BAC DNA | 130 bp | Prim. denaturing: / |
| 14187/ | Exon 38 | | | 95° C. |
| Rvstswi | | | | Sec. denaturing: / |
| 14187 | | | | 95° C. |
| (Acc- | | | | Annealing: 30 sec/ |
| No: G21943) | | | | 55.5° C. |
| | | | | Extension: 30 sec |
| | | | | 72° C. |
| | | | | Final extension: 72° C. |

Cycler: Eppendorf MastercycIer

| | | | | |
|---|---|---|---|---|
| Fostswi | Exon 38 | MCF 7 | 130 bp | Prim. denaturing: / |
| 14187/ | Exon 38 | Cell | | 95° C. |
| Rvstswi | | (cDNA) | | Sec. denaturing: / |
| 14187 | | | | 95° C. |
| (Acc-No: G21943) | | | | Annealing: 30 sec/ |
| | | | | 55.5° C. |
| | | | | Extension: 30 sec |
| | | | | 72° C. |
| | | | | Final extension: 72° C. |

Cycler: GradientercycIer Biometra
Note.:
Gradient of 50° C. to 70° C.

| | | | | |
|---|---|---|---|---|
| DRIPVRU5/ | Exon 35 | WRO | 483 bp | Prim. denaturing: / |
| DRIPVRL6 | Exon 38 | (cDNA) | | 95° C. |
| | | | | Sec. denaturing: / |
| | | | | 95° C. |
| | | | | Annealing: 30 sec/ |
| | | | | 60.8° C. |
| | | | | Extension: 50 sec |
| | | | | 72° C. |
| | | | | Final extension: 72° C. |

Cycler: Eppendorf MastercycIer
Note.:
Gradient of 50° C. to 70° C.

| | | | | |
|---|---|---|---|---|
| DRIPVRU | Exon 33 | WRO | 162 bp | Prim. denaturing: / |
| DRIPVRL 14 | Exon 34 | (cDNA) | | 95° C. |
| | | | | Sec. denaturing: / |
| | | | | 95° C. |
| | | | | Annealing: 30 sec/ |
| | | | | 55.5° C. |
| | | | | Extension: 30 sec |
| | | | | 72° C. |
| | | | | Final extension: |
| | | | | 72° C. |

Cycler: GradientencycIer Biometra
Note.:
Gradient of 50° C. to 70° C.

| | | | | |
|---|---|---|---|---|
| DRIPVRU11/ | Exon 35 | (BAC | 981 bp | Prim. denaturing: / |
| DRIPVRL12 | Exon 33 | DNA) | | 95° C. |
| | | | | Sec. denaturing: / |
| | | | | 95° C. |
| | | | | Annealing: 30 sec/ |
| | | | | 55.5° C. |
| | | | | Extension: 30 sec |
| | | | | 72° C. |
| | | | | Final extension: |
| | | | | 72° C. |

Cycler: GradientencycIer Biometra
Note.:
Gradient of 50° C. to 70° C.

| | | | | |
|---|---|---|---|---|
| DRIPVRU16/ | Exon 14 | MCF 7 | 820 bp | Prim. denaturing: / |
| DRIPVRL10 | Exon 19 | (cDNA) | | 95° C. |
| | | | | Sec. denaturing: / |
| | | | | 95° C. |
| | | | | Annealing: 30 sec/ |
| | | | | 55.5° C. |
| | | | | Extension: 30 sec |
| | | | | 72° C. |
| | | | | Final extension: 72° C. |

Cycler: GradientencycIer Biometra
Note.:
Gradient of 50° C. to 70° C.

| | | | | |
|---|---|---|---|---|
| DRIPVRU9/ | Exon 18 | MCF 7 | 201 bp | Prim. denaturing: / |
| DRIPVRL10 | Exon 19 | (cDNA) | | 95° C. |
| | | | | Sec. denaturing: / |
| | | | | 95° C. |
| | | | | Annealing: 30 sec/ |
| | | | | 57.3° C. |
| | | | | Extension: 30 sec |
| | | | | 72° C. |
| | | | | Final extension: |
| | | | | 72° C. |

Cycler: GradientencycIer Biometra
Note.:
Gradient of 50° C. to 70° C./Proof at 57.3° C. and 64.4° C.

| | | | | |
|---|---|---|---|---|
| DRIPVRU9/ | Exon 18 | 204D19 | 479 bp | Prim. denaturing: / |
| DRIPVRL10 | Exon 19 | (BAC | | 95° C. |
| | | DNA) | | Sec. denaturing: / |
| | | | | 95° C. |
| | | | | Annealing: 1 min./ |
| | | | | 60° C. |
| | | | | Extension: 45 sec |
| | | | | 72° C. |
| | | | | Final extension: 72° C. |

Cycler: Eppendorf MastercycIer
Note.:
Gradient of 50° C. to 70° C.

| | | | | |
|---|---|---|---|---|
| DRIPVRL8/ | Exon 8/ | MCF 7 | 1105 bp | Prim. denaturing: / |
| DRIPVRU9 | Exon 9 | (cDNA) | | 95° C. |
| | | | | Sec. denaturing: 1/ |
| | | | | 95° C. |
| | | | | Annealing: 1 min./ |
| | | | | 55.5° C. |
| | | | | Extension: 1.5 |
| | | | | 72° C. |
| | | | | Final extension: |
| | | | | 72° C. |

Cycler: Eppendorf MastercycIer
Note.:
Gradient of 50° C. to 70° C.

| | | | | |
|---|---|---|---|---|
| DRIPVRU5/ | Exon 35 | WRO | 764 bp | Prim. denaturing: / |
| DRIPVRL2 | Exon 38 | Cell | | 95° C. |
| | | (cDNA) | | Sec. denaturing: / |
| | | | | 95° C. |
| | | | | Annealing: 1 min./ |
| | | | | 55.5° C. |
| | | | | Extension: 1.5 |
| | | | | 72° C. |
| | | | | Final extension: |
| | | | | 72° C. |

Cycler: Eppendorf MastercycIer
Note.:
Gradient of 50° C. to 70° C.

| | | | | |
|---|---|---|---|---|
| DRIPVRU7/ | Exon 22 | 204D19 | 505 bp | Prim. denaturing: / |
| DRIPVRL8 | Exon 22 | (BAC | | 95° C. |
| | | DNA) | | Sec. denaturing: / |
| | | | | 95° C. |
| | | | | Annealing: 30 sec/ |
| | | | | 60° C. |
| | | | | Extension: 1 min. |
| | | | | 72° C. |
| | | | | Final extension: |
| | | | | 72° C. |

Cycler: GradientencycIer Biometra

PCR I

| | | | |
|---|---|---|---|
| DRIPVRL2/ | Exon 14 | WRO | Prim. denaturing: / |
| DRIPVRU16 | Exon 38 | (cDNA) | 95° C. |
| | | | Sec. denaturing: / |
| | | | 95° C. |
| | | | Annealing: 45 sec/ |
| | | | 65° C. |
| | | | Extension: 4 min. |
| | | | 72° C. |
| | | | Sec. denaturing: |
| | | | 95° C. |
| | | | Annealing: 45 sec |
| | | | 55° C. 10x |
| | | | Extension: 5 min. |
| | | | 72° C. |
| | | | Final extension: 72° C. |

Cycler: GradientencycIer Biometra
Note.:
First PCR for generating the template for subsequent PCR II

PCR II

| | | | | |
|---|---|---|---|---|
| DRIPVRL2/ | Exon 1/ | Template | Ca. 3.5 kb | Prim. denaturing: |
| DRIPVRU16 | Exon 25 | from | | 3 min/ |
| | | PCR I | | 95° C. |
| | | | | Sec. denaturing: / |
| | | | | 95° C. |
| | | | | Annealing: 45 sec/ |
| | | | | 55° C. |
| | | | | Extension: 5 min. |
| | | | | 72° C. |
| | | | | Final extension: |
| | | | | 72° C. |

Cycler: GradientencycIer Biometra

| | | | | |
|---|---|---|---|---|
| DRIPVRU17/ | Exon 18 | cDNA | 880 bp | Prim. denaturing: / |
| DRIPVRL4 | Exon 32 | Clone | | 95° C. |
| | | (DI | | Sec. denaturing: / |
| | | | | 95° C. |
| | | | | Annealing: 45 sec/ |
| | | | | 65° C. |
| | | | | Extension: 1 min. |
| | | | | 72° C. |
| | | | | Final extension: |
| | | | | 72° C. |

Cycler: GradientencycIer Biometra
Note:
cDNA clone from transformation of the PCR product from PCR II

[0358] Primer sequences

| | | |
|---|---|---|
| Primer | Sequence (5 → 3′) | Localisat |

| | | |
|---|---|---|
| DRIPVRL2 | TCAACATGCCGCTTCTGTTCTTGGAA.GAGTTAA | Exon 38 |
| DRIPVRL4 | TACTGGGGCAGGCGTGGCACCTTGAAG | Exon 32 |
| DRIPVRU5 | TGGCCGTCGTTGAAGTCCTCACCAGT | Exon 35 |
| DRIPVRL6 | GCCAGCCGGACTTTGAGAGGAGACAGAAG | Exon 38 |
| DRIPVRL8 | CAATGGAACCAGAACATGAAGCCAAGCAGTCT | Exon 22 |
| DRIPVRU9 | GCTTGAGGCAGCAGCAGCATTTCCA | Exon 18 |
| DRIPVRL10 | ATTGGGATGAGGCCTTCAGGGGATGA | Exon 19 |
| DRIPVU11 | CCTGCCCCAGTACCTCCAGAGCCTCAC | Exan 32 |
| DRIPVL12 | GAACTCCTTTGGGGTCAGATGGACACAGTG | Exon 33 |
| DRIPW 13 | ACTGCATGGACCCTGGTGAGTGGCT | Exon 33 |
| DRIPVL14 | GCATGTGGTGGGAAATGACTTTGGAAG | Exan 34 |
| DRIPVU16 | AGAGTA.AATCCAAACGTGAACGAGAGAATGAGT | Exon 14 |
| DRIPVRU17 | | Exon 26 |
| FOSTSWT | ATTTATGTTCAACATGTTTCCTGC | Exon 38 |
| 14187 | | |
| (Acc-No: | | |
| RVSTSWI | TTAACTGCCTCGATTCTGCA | Exon 38 |
| 14187 | | |
| (Acc-No: | | |
| G21943) | | |

Used Cell Lines
[0359] MCF-7 (human breast adenocarcinoma)
[0360] No:DSM ACC 115
[0361] DSMZ (Deutsche Sammlung von Mikroorganismen and Zellkulturen GmbH) [German Collection of Microorganisms and Cell Cultures GmbH]
[0362] HELA (human cervix carcinoma)
[0363] No: DSM ACC 57
[0364] DSMZ (Deutsche Sammlung von Mikroorganismen and Zellkulturen GmbH)
   WRO
[0365] BAC 339H12
[0366] BAC 204D 19
   Protocol for RNA Isolation
   Treatment with Trizol (Flue!; Blocked Pipette Tips!)
   I. Dissolving Cells

[0367] Fully suction medium from the cell culture bottle (Impfbank); wipe out flue with ethanol (70%); prepare 1.5 ml cup (sterile cups, not autoclaved); add 1 ml Trizol directly to the cell culture bottle; suspend the cells by pipetting up and down; transfer cell suspension by pipette to the cup; store cells at −80° C.; place used pipette tips in autoclave waste; leave cell culture bottles to flash into steam under the flue.

II. Phase Separation

[0368] Pre-heat water bath to 30° C.; cool centrifuge to 4° C.; thaw cell suspension (and) incubation at RT for 5 min; add 200 μl chloroform per ml Trizol; shake suspension strongly; incubation in water bath at 30° C. for 2-3 min; centrifuging at 12ooo xg and 4° C. for 15 min.

III. RNA Precipitation

[0369] Transfer upper phase (RNA!) by pipette to a fresh sterile 1.5 ml cup; add 500 μl iso-amylalcohol (isopropanol); spin carefully; incubation in water bath at 30° C. for 10 min; centrifuging at 12ooo xg and 4° C. for 10 min; then IMMEDIATELY remove excess length by pipette; phenol waste (!).

IV. Washing the RNA

[0370] Add 1 ml ethanol (75%) to the pellet—vortex briefly; centrifuging at 7500 xg and 4° C. for 5 min; then IMMEDIATELY remove excess length by pipette; phenol waste (!); leave pellet to dry at RT under the flue for at least 10 min; set water bath at 55° C. (or 60° C.).

V. Dissolving the RNA

[0371] Add 30-50 μl sterile dH20 (sterile), depending on size of the pellet; incubation in water bath at 55° C. for 10 min; then place samples immediately on ice; store at −80° C. (or determining concentration).

VI. Determining Concentration

[0372] Place 60 μl sterile sdH20 in plastic cuvette; measure empty value; add 1 μl RNA—mix; determine concentration at 260/280 nm+quotient; store RNA at −80° C.

Fish

[0373] Carrying out FISH is described for example in Kieviets et al. (Kievits T, Dauwerse J. G., Wiegant J., Devilee P.,

[0374] Breuning M. H., Cornelisse C. J., van Ommen G. J. B., Pearson P. L.: Rapid subchromosomal localization of cosmids by nonradioactive in situ hybridization. Cytogenet Cell Genet. 53: 134-136(1990)).

[0375] 3′-RACE-RT-PCR conditions of S533/TSV40 for proof of the DRIP-FUS2 gene

[0376] Template name: cDNA obtained from purifying the total RNA of cells of the cell line S533T/SV40 after reverse transcriptase reaction with AP primer (poly T plus UAP-2 partial sequence)

| Upper | Lower Primer |
|---|---|
| DRIPVRU 19 | UAP-2 (5′- |
| | CUACUACUA- |
| | CUAAAG- |
| | GATCCGTCGA- |

| | Volume | |
|---|---|---|
| | (concentration) | |
| Template | 1.5 | μl |
| 10 × Advantage 2 PCR | 5 | μl |
| buffer | | |
| Upper Primer | 1 | μl |
| (10 μM) | | |
| Lower Primer | 1 | μl |
| (10 μM) | | |
| dNTPs | 1 | μl |
| (10 mM; Promega) | | |
| 50 × Advantage 2 | 1 | μl |
| polymerase mix | | |
| bidest. H₂0 | 39.5 | μl |
| Total volume | 50 | μl |

[0377]

| Step | Time | | Temperatur [symbol] | Cycles |
|---|---|---|---|---|
| 1.1 | 20 | sec. | 95° C. | 5 |
| 1.2 | 5 | min. | 72° C. | |
| 2.1 | 20 | sec. | 94° C. | 5 |
| 2.2 | 10 | sec. | 70° C. | |
| 2.3 | 5 | min. | 72° C. | |
| 3.1 | 20 | sec. | 94° C. | 25 |
| 3.2 | 10 | sec. | 68° C. | |
| 3.3 | 5 | min. | 72° C. | |
| 4 | 3 | min. | 72° C. | 1 |

PCR Conditions for Probe Manufacture (DRIP-FUS2)
[0378] Template description: EIL3500 (cDNA clone; from PCR with DRIPVU16/DRIPVRL2)

[0379] Product length: 201 bp

| Upper | Lower Primer |
|---|---|
| DRIPVRU 19 | DRIPVRL 4 |

| | Volume | |
|---|---|---|
| | (concentration) | |
| Template (1:100) | 1 | μl |
| 10 × PCR RxN buffer; MgCl₂ | 2 | μl |
| (Invitrogen) | | |
| Upper Primer | 1 | μl |
| (10 μM) | | |
| Lower Primer | 1 | μl |
| (10 μM) | | |
| dNTPs* | 1 | μl |
| MgCl₂ | 0.6 | μl |
| (50 mM; Invitrogen) | | |
| Taq DNA polymerase | 0.25 | μl |
| recombinant (5 U/μl; | | |
| bidest. H₂0 | 13.15 | μl |
| Total volume | 20 | μl |

*dNTP-Mix: 1.5 μl DIG-11-dUTP alkali labile (25 nM; Roche) + 3 μl dNTPs (10 mM)

[0380]

| Step | Time | | Temperatur [symbol] | Cycles |
|---|---|---|---|---|
| 1.1 | 3 | min. | 95° C. | 1 |
| 2.1 | 45 | sec. | 95° C. | 35 |
| 2.2 | 45 | sec. | 58° C. | |
| 2.3 | 60 | sec. | 72° C. | |
| 3 | 10 | min. | 72° C. | 1 |

Purifying of Probe DNA with PCR Purification Kit (Qiagen)

[0381] 3′-RACE-RT-PCR conditions for S325/TSV40 for proof of the DRIP-FUS1 gene
[0382] Template description: S325T/SV40 (cDNA)

[0383] Type of upper primer and lower primer and reaction preparation identical as for 3′-RACE-RT-PCR for S325T/SV 40

| Step | Time | | Temperatur [symbol] | Cycles |
|---|---|---|---|---|
| 1.1 | 60 | sec. | 94° C. | 1 |
| 2.1 | 30 | sec. | 94° C. | 35 |
| 2.2 | 6 | min. | 68° C. | |
| 3 | 6 | min. | 68° C. | 1 |

PCR Conditions for Probe Manufacture (DRIP-FUS1)
[0384] Template description: EIL3500 (cDNA clone; from PCR with DRIPVU16/DRIPVRL2)

[0385] Product length: 201 bp

| Upper | Lower Primer |
|---|---|
| DRIPVRU9 | DRIPVRL10 |

| | Volume | |
|---|---|---|
| | (concentration) | |
| Template (1:100) | 1 | μl |
| 10 × PCR RxN buffer; MgCl₂ | 5 | μl |
| (Invitrogen) | | |
| Upper Primer | 1 | μl |
| (10 μM) | | |
| Lower Primer | 1 | μl |
| (10 μM) | | |
| dNTPs* | 1 | μl |
| MgCl₂ | 1.5 | μl |
| (50 mM; Invitrogen) | | |
| Taq DNA polymerase | 0.5 | μl |
| recombinant (5 U/μl; | | |
| bidest. H₂0 | 39 | μl |
| Total volume | 50 | μl |

*dNTP-Mix: 2 μl DIG-11-dUTP alkali labile (25 nM; Roche) + 4 μl dNTPs (10 mM)

[0386]

| Step | Time | | Temperatur [symbol] | Cycles |
|---|---|---|---|---|
| 1.1 | 3 | min. | 95° C. | 1 |
| 2.1 | 45 | sec. | 95° C. | 35 |
| 2.2 | 45 | sec. | 55° C. | |
| 2.3 | 60 | sec. | 72° C. | |
| 3 | 10 | min. | 72° C. | 1 |

Protocol for Non-Radioactive Hybridising (Southern-Blot) (RACE-PCR DRIP-FUS1 and DRIP-FUS2)
I.
[0387] 5 min in 2×SSC
[0388] 2×10 min in depurining buffer
[0389] 2×15 min in denaturing buffer
[0390] 3×10 min in neutralising buffer
[0391] 5 min in 20×SSC
   II.
[0392] Start (run warm) vacuum pump at least 15 min prior to blotting
[0393] Cut out Whatman filter and Hybond-N membrane (Amersham Pharmacia Biotech) (somewhat larger than the gel)
[0394] Assemble blot apparatus (Model 785 vacuum blotter; Biorad)
[0395] Attach vacuum (5 inch/mm Hg)
[0396] Carefully pour 20×SSC, as soon as the gel is suctioned
[0397] Blot for 1-2 h (depending on size/density of the gel)
[0398] Every 10 min coat gel with 20×SSC
[0399] After the blot:—mark pockets of the gel on the membrane in pencil
[0400] Fix DNA on membrane: UV crosslink in Fluo-Link (Biometra) at setting 0.4 t 40 sec.)
   III. Hybridising
[0401] Pre-heat express hybridising solution (Clontech) in water bath to 60° C.
[0402] Pre-heat hybridising oven to 60° C.
[0403] Lie membrane on gauze and roll up from the bottom and place in a hybridising bottle
[0404] Add 5 ml Exp-Hyb-solution
[0405] Prehybridising for 30 min* at 60° C. in the hybridising oven
[0406] Denature probe after 20 min*: 10 min at 95° C. (in PCR block, Biometra) place probe on ice immediately after !
[0407] Pipette in Sarstedt tube: vortex 5 ml Exp-Hyb solution +2 μl probe (80 ng/μl)
[0408] Place Exp-Hyb solution+probe on membrane in hybridising bottle
[0409] Hybridising overnight in hybridising oven at 60° C.
   IV. Wash Membrane
[0410] Preparation: 1) pre-heat 0.1×SSC/0.1% SDS in hybridising oven to 60° C., 2) produce buffer 1/1% blocking reagent, plus: mix 90 ml buffer 1+10 ml 10% blocking reagent, whereof: pipette off 10 ml in Sarstedt tube (for point 27)
   Membrane on Agitator for x min in:
[0411] 2×15 min in 2×SSC/0.1% SDS at RT
[0412] 2×15 min in 0.1×SSC/0.1% SDS (pre-heated)
[0413] 5 min in buffer 1/0. 3% Tween-20
[0414] 30 min in buffer 1/1% blocking reagent
[0415] 30 min in 10 ml buffer 1/1% blocking reagent +1μ, anti-dig-
[0416] AP, FAB fragments (150 U/200. μ1; Enzo)
[0417] 2×15 min in buffer 1/0, 3% Tween-20
[0418] 5 min in buffer 3
   V. Proof
[0419] Pipette following components together in a 1.5 ml cup
[0420] Middle membrane: 1.5 ml buffer 3+15 l CPD-Star (25 mM; Cellmark Diagnostics)
[0421] Lie membrane in a film and weld on 3 sides
[0422] Add solution directly onto the membrane (on the DNA side)
[0423] Weld film without air bubbles and lie in autoradiography cassette DNA side facing up

[0424] Further processing in the photo laboratory under red light!
[0425] Lie Hyperfilm-ECL (Amersham Pharmacia Biotech) on membrane;
[0426] mark corner and identify pockets of the membrane to film
[0427] Leave to light 10 min
[0428] Leave film in developing bath until it darkens
[0429] Place film 10 min in fixing bath
[0430] Water film 10 min in water+glacial acetic acid
[0431] Dry film in drying cabinet
   Buffer for Southern Blot
   Depurining Buffer
[0432] 0.25 MHCl [20 mlHCI (37%)]
[0433] add. bidest>1000 ml

[0434] Denaturing buffer (2000 ml)
[0435] 0.5 NaOH [40 g NaOH (Mw: 40 g/mol)]
[0436] 1.5 M NaCl [175.32 gNaCl (Mw: 58.44 g/mol)]
[0437] add. bidest>2000 ml
[0438] pH 7.4

[0439] Neutralising buffer (2000 ml)
[0440] 1.5M NaCl [175.32 g NaCI (Mw:58.44 g/mol)]
[0441] 0.5 M Tris-HCl [157.6 g Tris-HCl (Mw: 157.6 g/mol)]
[0442] pH 7.4
[0443] 20×SSC (2000 ml)
[0444] 3 M NaCl [350.64 g NaCl (Mw: 58.44 g/mol)]
[0445] 0.3 M Na citrate [176.46 g Na citrate (Mw: 294.1 g/mol)]
[0446] add. bidest>2000 ml
[0447] pH 7.0

[0448] Buffer 1 (2000 ml)
[0449] 0.1 M maleic acid [23.2 g maleic acid (Mw: 116.07 g/mol)]
[0450] 0.15 M NaCl [17.4 gNaCl (Mw: 58.44 g/mol)]
[0451] 15.8 g NaOH [(Mw: 40 g/mol)]
[0452] add. bidest >2000 ml
[0453] pH 7.5
[0454] 2×SSC/0.1% SDS(1000 ml)
[0455] 100ml 20×SSC
[0456] 5 ml 20% SDS
[0457] add. bidest>1000 ml
[0458] 0.1×SSC/0.1% SDS (1000 ml)
[0459] 5ml 20×SSC
[0460] 5 ml 20% SDS
[0461] add. bidest>1000 ml

[0462] Washing buffer (1000 ml)
[0463] buffer 1 [997 ml buffer 1]
[0464] 0.3% Tween20 [3 ml Tween20]

[0465] Blocking stock solution (250 ml)
[0466] 10% (w/v) blocking reagent [25 g blocking reagent]
[0467] in buffer 1 [add. buffer 1 >250 ml]

[0468] Buffer 3(1000 ml)
[0469] 0.1 MTris-HCl [15.76 g Tris-HCl (Mw: 157.6 g/mol)]
[0470] 0.1 M NaCl [5.84 g NaCl (Mw: 58.44 g/mol)]
[0471] add. bidest>1000 ml
[0472] pH 9.5
[0473] 0.4 M NaOH (1000 ml)
[0474] 16 gNaOH [(Mw: 40 g/mol)]
[0475] add. bidest >1000 ml

[0476] Strip buffer (1000 ml)
[0477] 0.1×SSC [5 ml 20×SSC]
[0478] 0.1% SDS [5 ml 20% SDS]
[0479] 0.2 MTris-HCl [31.52 g Tris-HCl (Mw: 157.6 g/mol)]
[0480] add. bidest>1000 ml
   PCR Proof

[0481] Completed DRIP- or DRIP-FUS PCRs

TABLE
Completed DRIP-or DRIP-FUS PCRs an cDNA or genomic DNA

| | Localisation | | Localisation | | | |
|---|---|---|---|---|---|---|
| Upper | Upper Primer | Lower | Lower Primer | | Fragment | |
| Primer | (Exon) | Primer | (Exon) | Template | length | |
| DRIP proof | | | | | | |
| DRIPVU17 | 25 | DRIPVRL4 | 32 | cDNA | 880 | bp |
| DRIPVRU5 | 35 | DRIPVRL2 | 38 | cDNA | 764 | bp |
| DRIPVRU7 | 22_long | DRIPVRL8 | 22_long | cDNA | 505 | bp |
| DRIPVRU7 | 22_long | DRIPVRL8 | 22_long | genomic | 505 | bp |
| | | | | DNA | | |
| DRIPVRU9 | 18 | DR1PVRL10 | 1 | genomic | 479 | bp |
| | | | | DNA | | |
| DRT.PVRU9 | 18 | DRIPVRL10 | 1 | cDNA | 201 | bp |
| DRIPW 11 | 32 | DRIPVL12 | 3 | genomic | 981 | bp |
| | | | | DNA | | |
| DRIPW11 | 32 | DRIPVL12 | 3 | cDNA | 370 | bp |
| DRIPViJll | 32 | DRIPVRL6 | 3 | oDNA | 1049 | bp |
| DRIPW13 | 33 | DRIPVL14 | 3 | cDNA | 162 | bp |
| DRIPV(J16 | 14 | DRIPVRL10 | 1 | cDNA | 820 | bp |
| DRIPW16 | 14 | DRIPVRL2 | 38 | cDNA | ˜3.5 | kb |
| DRIPW19 | 28 | DRIPVRL4 | 32 | cDNA | 560 | bp |
| | | | Exon from | | | |
| DRIP-FUS II proof | | | 7p15 | | | |
| DRIPVU19 | 28 | FUSIIL01 | A | cDNA- | 699 | bp |
| DRIPVU39 | 28 | FUSIIL03 | A | cDNA- | 1142 | bp |

| | | | Exon from | | |
|---|---|---|---|---|---|
| DRIP-FUS I proof | | | 3β25 | | |
| DRIPVUI9 | 28 | FUSVL01 | I | cDNA- | 150 bp/ |
| | | | | | 268 bp |
| DRIPVU19 | 28 | FUSVL03 | I | cDNA- | 165 bp/ |
| | | | | | 283 bp |

[0482] PCR Conditions in Detail Define Standard PCR Mix:

| Further designated as | Volume | |
|---|---|---|
| standard PCR mix | (concentration | |
| Template (1:200 diluted) | 1 | μl |
| 10 × PCR RxN buffer; MgCl₂ | 2 | μl |
| (Invitrogen) | | |
| Upper Primer | 1 | μl |
| (10 μM) | | |
| Lower Primer | 1 | μl |
| (10 μM) | | |
| dNTPs | 1 | μl |
| (10 mM; Invitrogen) | | |
| MgCl₂ | 0.6 | μl |
| (50 mM; Invitrogen) | | |
| Taq DNA polymerase | 0.25 | μl |
| recombinant (5 U/μl; | | |
| Bidest. H₂0 | 13.15 | μl |
| Total volume | 20 | μl |

[0483] Template description: DIL3500 (cDNA clone; from PCR with DRIPVU16/DRIPVRL2)

[0484] Product length: 880 bp

| Upper | Lower |
|---|---|
| Primer | Primer |
| DRIPVRUI7 | DRIPVRL4 |

Standard PCR Mix

[0485] Thermocycler:

| Step | Time | | Temperatur [symbol] | Cycles |
|---|---|---|---|---|
| 1 | 3 | min. | 95° C. | 1 |
| 2.1 | 45 | sec. | 95° C. | 35 |
| 2.2 | 45 | sec. | 66° C. | |
| 2.3 | 60 | sec. | 72° C. | |
| 3 | 10 | min. | 72° C. | 1 |

[0486] The following result was obtained: main band at 880 bp; a weak band at ˜650 bp; heterogeneous clone rnixture with clones with exon 14 and exon 15 as well as clones without exon 14 and exon 15 (splice variants)

PCR Conditions

[0487] Template description: MGF-7 (cDNA)

[0488] Product length: 130 bp

| Upper Primer | Lower Primer |
|---|---|
| Rvstswil4187 | Fostswil4187 |

[0489] Standard PCR Mix

| Step | Time | | Temperatur [symbol] | Cycles |
|---|---|---|---|---|
| 1 | 3 | min. | 95° C. | 1 |
| 2.1 | 45 | sec. | 95° C. | 35 |
| 2.2 | 30 | sec. | 56° C. | |
| 2.3 | 30 | sec. | 72° C. | |
| 3 | 10 | min. | 72° C. | 1 |

PCR Conditions
[0490] Template description: BAC204D19 (genomic DNA)

[0491] Product length: 505 bp

| Upper | Lower |
|---|---|
| Primer | Primer |
| DRIPVRU7 | DRIPVRL8 |

[0492] Standard PCR Mix

| Step | Time | | Temperatur [symbol] | Cycles |
|---|---|---|---|---|
| 1 | 3 | min. | 95° C. | 1 |
| 2.1 | 45 | sec. | 95° C. | 35 |
| 2.2 | 30 | sec. | 56° C. | |
| 2.3 | 30 | sec. | 72° C. | |
| 3 | 10 | min. | 72° C. | 1 |

PCR Conditions
[0493] Template description: HeLa (cDNA)

[0494] Product length: 505 bp

| Upper | Lower |
|---|---|
| Primer | Primer |
| DRIPVRU7 | DRIPVRL8 |

[0495] Standard PCR Mix

| Step | Time | | Temperature | Cycles |
|---|---|---|---|---|
| 1 | 3 | min. | 95° C. | 1 |
| 2.1 | 45 | sec. | 95° C. | 35 |
| 2.2 | 30 | sec. | 53° C. | |
| 2.3 | 30 | sec. | 72° C. | |
| 3 | 10 | min. | 72° C. | 1 |

PCR Conditions
[0496] Template description: BAC204D19 (genomic DNA)

[0497] Product length: 479 bp

| Upper | Lower |
|---|---|
| Primer | Primer |
| DRIPVRU9 | DRIPVRL10 |

[0498] Standard PCR Mix

| Step | Time | | Temperature | Cycles |
|---|---|---|---|---|
| 1 | 3 | min. | 95° C. | 1 |
| 2.1 | 45 | sec. | 95° C. | 35 |
| 2.2 | 30 | sec. | 56° C. | |
| 2.3 | 45 | sec. | 72° C. | |
| 3 | 10 | min. | 72° C. | 1 |

PCR Conditions
[0499] Template description: DIL3500 (cDNA clone; from PCR with DRIPVU16/DRIPVRL2)

[0500] Product length: 201 bp

| Upper | Lower |
|---|---|
| Primer | Primer |
| DRIPVRU9 | DRIPVRL10 |

[0501] Standard PCR Mix

| Step | Time | | Temperature | Cycles |
|---|---|---|---|---|
| 1 | 3 | min. | 95° C. | 1 |
| 2.1 | 45 | sec. | 95° C. | 35 |
| 2.2 | 45 | sec. | 66° C. | |
| 2.3 | 60 | sec. | 72° C. | |
| 3 | 10 | min. | 72° C. | 1 |

PCR Conditions
[0502] Templatep description: MCF 7 (cDNA)

[0503] Product length: 201 bp

| Upper | Lower |
|---|---|
| Primer | Primer |
| DRIPVRU9 | DRIPVRL10 |

[0504] Standard PCR Mix

| Step | Time | | Temperature | Cycles |
|---|---|---|---|---|
| 1 | 3 | min. | 95° C. | 1 |
| 2.1 | 45 | sec. | 95° C. | 35 |
| 2.2 | 30 | sec. | 56° C. | |
| 2.3 | 30 | sec. | 72° C. | |
| 3 | 10 | min. | 72° C. | 1 |

PCR Conditions
[0505] Template description: S325T/SV40 (cDNA)

[0506] Product length: 201 bp

| Upper | Lower |
|---|---|
| Primer | Primer |
| DRIPVRU9 | DRIPVRL10 |

[0507] Standard PCR Mix

| Step | Time | | Temperature | Cycles |
|---|---|---|---|---|
| 1 | 3 | min. | 95° C. | 1 |
| 2.1 | 45 | sec. | 95° C. | 35 |
| 2.2 | 45 | sec. | 55° C. | |
| 2.3 | 60 | sec. | 72° C. | |
| 3 | 10 | min. | 72° C. | 1 |

PCR Conditions
[0508] Template description: S325T/SV40 (cDNA)

[0509] Product length: 201 bp

| Upper | Lower |
|---|---|
| Primer | Primer |
| DRIPVRU9 | DRIPVRL10 |

[0510] Standard PCR Mix

| Step | Time | | Temperature | Cycles |
|---|---|---|---|---|
| 1 | 3 | min. | 95° C. | 1 |
| 2.1 | 45 | sec. | 95° C. | 35 |
| 2.2 | 45 | sec. | 55° C. | |
| 2.3 | 60 | sec. | 72° C. | |
| 3 | 10 | min. | 72° C. | 1 |

PCR Conditions
[0511] Template description: BAC 339H12 (genomic DNA)

[0512] Product length: 981 bp

| Upper | Lower |
|---|---|
| Primer | Primer |
| DRIPVRU11 | DRIPVRL12 |

[0513] Standard PCR Mix

| Step | Time | | Temperature | Cycles |
|---|---|---|---|---|
| 1 | 3 | min. | 95° C. | 1 |
| 2.1 | 45 | sec. | 95° C. | 35 |
| 2.2 | 30 | sec. | 57° C. | |
| 2.3 | 30 | sec. | 72° C. | |
| 3 | 10 | min. | 72° C. | 1 |

PCR Conditions
[0514] Template description: DIL3500 (cDNA clone; from PCR with DRIPVU16/DRIPVRL2)

[0515] Product length: 370 bp

| Upper | Lower |
|---|---|
| Primer | Primer |
| DRIPVRU11 | DRIPVRL12 |

[0516] Standard PCR Mix

| Step | Time | | Temperature | Cycles |
|---|---|---|---|---|
| 1 | 3 | min. | 95° C. | 1 |
| 2.1 | 45 | sec. | 95° C. | 35 |
| 2.2 | 45 | sec. | 64° C. | |
| 2.3 | 60 | sec. | 72° C. | |
| 3 | 10 | min. | 72° C. | 1 |

PCR Conditions
[0517] Template description: WRO (cDNA)

[0518] Product length: 1049 bp

| Upper | Lower |
|---|---|
| Primer | Primer |
| DRIPVRU11 | DRIPVRL6 |

[0519] Standard PCR Mix

| Step | Time | | Temperatur [symbol] | Cycles |
|---|---|---|---|---|
| 1 | 3 | min. | 95° C. | 1 |
| 2.1 | 60 | sec. | 95° C. | 35 |
| 2.2 | 60 | sec. | 60° C. | |
| 2.3 | 90 | sec. | 72° C. | |
| 3 | 10 | min. | 72° C. | 1 |

PCR Conditions
[0520] Template description: MCF-7 (cDNA)

[0521] Product length: 162 bp

| Upper | Lower |
|---|---|
| Primer | Primer |
| DRIPVRU13 | DRIPVRL14 |

[0522] Standard PCR Mix

| Step | Time | | Temperatur [symbol] | Cycles |
|---|---|---|---|---|
| 1 | 3 | min. | 95° C. | 1 |
| 2.1 | 45 | sec. | 95° C. | 35 |
| 2.2 | 30 | sec. | 56° C. | |
| 2.3 | 30 | sec. | 72° C. | |
| 3 | 10 | min. | 72° C. | 1 |

PCR Conditions
[0523] Template description: DIL3500 (cDNA clone; from PCR with
[0524] DRIPVU16/DRIPVRL2)

[0525] Product length: 820 bp

| Upper | Lower |
|---|---|
| Primer | Primer |
| DRIPVRU16 | DRIPVRL10 |

[0526] Standard PCR Mix

| Step | Time | | Temperatur [symbol] | Cycles |
|---|---|---|---|---|
| 1 | 3 | min. | 95° C. | 1 |
| 2.1 | 45 | sec. | 95° C. | 35 |
| 2.2 | 45 | sec. | 52° C. | |
| 2.3 | 60 | sec. | 72° C. | |
| 3 | 10 | min. | 72° C. | 1 |

PCR Conditions
[0527] Template description: WRO (cDNA)

[0528] Product length: ˜3.5 kbbp

| Upper | Lower |
|---|---|
| Primer | Primer |
| DRIPVRU16 | DRIPVRL2 |

| | |
|---|---|
| PCR 1 | Volume |
| | (Concentration) |

[0529] Standard PCR Mix

| Step | Time | | Temperatur [symbol] | Cycles |
|---|---|---|---|---|
| 1 | 3 | min. | 95° C. | 1 |
| 2.1 | 45 | sec. | 95° C. | 5 |
| 2.2 | 30 | sec. | 65° C. | |
| 2.3 | 30 | sec. | 72° C. | |
| 3 | 10 | min. | 72° C. | 1 |
| 4.1 | 45 | sec. | 95° C. | 10 |
| 4.2 | 45 | sec. | 55° C. | |
| 4.3 | 300 | sec. | 72° C. | |

[0530]

| | |
|---|---|
| Upper | Lower |
| Primer | Primer |
| DRIPVRU16 | DRIPVRL2 |

| | |
|---|---|
| PCR 2 | Volume |
| | (Concentration) |

[0531]

| Step | Time | | Temperatur [symbol] | Cycles |
|---|---|---|---|---|
| 1 | 3 | min. | 95° C. | 1 |
| 2.1 | 45 | sec. | 95° C. | 35 |
| 2.2 | 45 | sec. | 55° C. | |
| 2.3 | 300 | sec. | 72° C. | |
| 3 | 10 | min. | 72° C. | 1 |

PCR Conditions
[0532] Template description: DIL3500 (cDNA clone; from PCR with DRIPVU16/DRIPVRL2)

[0533] Product length: 560 bp

| Upper | Lower |
|---|---|
| Primer | Primer |
| DRIPVRU19 | DRIPVRL14 |

[0534] Standard PCR Mix

| Step | Time | | Temperatur [symbol] | Cycles |
|---|---|---|---|---|
| 1 | 3 | min. | 95° C. | 1 |
| 2.1 | 45 | sec. | 95° C. | 35 |
| 2.2 | 45 | sec. | 58° C. | |
| 2.3 | 60 | sec. | 72° C. | |
| 3 | 10 | min. | 72° C. | 1 |

PCR Conditions
[0535] Template description: S533T/SV40 (cDNA)

[0536] Product length: 699 bp

| Upper | Lower |
|---|---|
| Primer | Primer |
| DRIPVRU19 | FUSIILO1 |

[0537] Standard PCR Mix

| Step | Time | | Temperatur [symbol] | Cycles |
|---|---|---|---|---|
| 1 | 3 | min. | 95° C. | 1 |
| 2.1 | 45 | sec. | 95° C. | 35 |
| 2.2 | 45 | sec. | 60° C. | |
| 2.3 | 60 | sec. | 72° C. | |
| 3 | 10 | min. | 72° C. | 1 |

PCR Conditions FUS II Fusion Transcript
[0538] Template description: S533T/SV40 (cDNA)

[0539] Product length: 1142 bp

| Upper | Lower Primer |
|---|---|
| DRIPVRU19 | FUSIIO3 |

| | Volume | |
|---|---|---|
| | (concentration) | |
| Template | 0.5 | μl |
| 10 × PCR R×N buffer; MgCl₂ | 5 | μl |
| (Invitrogen) | | |
| Upper Primer | 1 | μl |
| (10 μM) | | |
| Lower Primer | 1 | μl |
| (10 μM) | | |
| dNTPs | 1 | μl |
| (10 nM; Promega) | | |
| MgCl₂ | 1.5 | μl |
| (50 mM; Invitrogen) | | |
| Taq DNA polymerase | 0.5 | μl |
| recombinant (5 U/μl; | | |
| Bidest. H₂0 | 39.5 | μl |
| Total volume | 50 | μl |

[0540]

| Step | Time | | Temperatur [symbol] | Cycles |
|---|---|---|---|---|
| 1 | 3 | min. | 95° C. | 1 |
| 2.1 | 45 | sec. | 95° C. | 35 |
| 2.2 | 45 | sec. | 60° C. | |
| 2.3 | 60 | sec. | 72° C. | |
| 3 | 10 | min. | 72° C. | 1 |

PCR Conditions for DRIP-FUS I Fusion Transcript

[0541] Template description: S533T/SV40 (cDNA)

| Upper | Lower Primer |
|---|---|
| DRIPVRU19 | FUSVLO1 |

| | Volume | |
|---|---|---|
| | (concentration) | |
| Template | 0.5 | μl |
| 10 × PCR R×N buffer; MgCl₂ | 5 | μl |
| (Invitrogen) | | |
| Upper Primer | 1 | μl |
| (10 μM) | | |
| Lower Primer | 1 | μl |
| (10 μM) | | |
| dNTPs | 1 | μl |
| (10 nM; Promega) | | |
| MgCl₂ | 1.5 | μl |
| (50 mM; Invitrogen) | | |
| Taq DNA polymerase | 0.5 | μl |
| recombinant (5 U/μl; | | |
| Bidest. H₂0 | 39.5 | μl |
| Total volume | 50 | μl |

[0542]

| Step | Time | | Temperatur [symbol] | Cycles |
|---|---|---|---|---|
| 1 | 3 | min. | 95° C. | 1 |
| 2.1 | 45 | sec. | 95° C. | 35 |
| 2.2 | 45 | sec. | 58° C. | |
| 2.3 | 1 | min. | 72° C. | |
| 3 | 10 | min. | 72° C. | 1 |

PCR Conditions
[0543] Template description: S533T/SV40 (cDNA)

[0544] Product length: 165 bp (without exon I); 283 bp (incl. exon I)

| Upper | Lower Primer |
|---|---|
| DRIPVRU19 | FUSVLO3 |

| | Volume | |
|---|---|---|
| | (concentration) | |
| Template | 0.5 | μl |
| 10 × PCR R×N buffer; MgCl₂ | 5 | μl |
| (Invitrogen) | | |
| Upper Primer | 1 | μl |
| (10 μM) | | |
| Lower Primer | 1 | μl |
| (10 μM) | | |
| dNTPs | 1 | μl |
| (10 nM; Promega) | | |
| MgCl₂ | 1.5 | μl |
| (50 mM; Invitrogen) | | |
| Taq DNA polymerase | 0.5 | μl |
| recombinant (5 U/μl; | | |
| Bidest. H₂0 | 39.5 | μl |
| Total volume | 50 | μl |

[0545]

| Step | Time | | Temperatur [symbol] | Cycles |
|---|---|---|---|---|
| 1 | 3 | min. | 95° C. | 1 |
| 2.1 | 45 | sec. | 95° C. | 35 |
| 2.2 | 45 | sec. | 58° C. | |
| 2.3 | 1 | min. | 72° C. | |
| 3 | 10 | min. | 72° C. | 1 |

PCR Conditions
[0546] Template description: BAC 339H12 (genomic DNA)

[0547] Product length: 130 bp

| Upper Primer | Lower Primer |
|---|---|
| Rvstswi14187 | Fostswi14187 |

[0548] Standard PCR Mix

| Step | Time | | Temperatur [symbol] | Cycles |
|---|---|---|---|---|
| 1 | 3 | min. | 95° C. | 1 |
| 2.1 | 45 | sec. | 95° C. | 35 |
| 2.2 | 30 | sec. | 56° C. | |
| 2.3 | 30 | sec. | 72° C. | |
| 3 | 10 | min. | 72° C. | 1 |

PCR Conditions
[0549] Template description: HeLa (cDNA)

[0550] Product length: 130 bp

| Upper | Lower Primer |
|---|---|
| Rvstswil41 | Fostswil4187 |

| | Volume |
|---|---|
| | (concentration) |
| Template | 2 μl |

| Step | Time | | Temperatur [symbol] | Cycles |
|---|---|---|---|---|
| 1 | 3 | min. | 95° C. | 1 |
| 2.1 | 45 | sec. | 95° C. | 35 |
| 2.2 | 30 | sec. | 56° C. | |
| 2.3 | 30 | sec. | 72° C. | |
| 3 | 10 | min. | 72° C. | 1 |

PCR Conditions
[0551] Template description: WRO (cDNA)

[0552] Product length: 764 bp

| Upper | Lower |
|---|---|
| Primer | Primer |
| DRIPVRU5 | DRIPVRL2 |

[0553] Standard PCR Mix

| Step | Time | | Temperatur [symbol] | Cycles |
|---|---|---|---|---|
| 1 | 3 | min. | 95° C. | 1 |
| 2.1 | 45 | sec. | 95° C. | 35 |
| 2.2 | 30 | sec. | 56° C. | |
| 2.3 | 30 | sec. | 72° C. | |
| 3 | 10 | min. | 72° C. | 1 |

[0554] The aspects of the invention, embodiments thereof as well as characteristics of the invention disclosed in the abovementioned description, the sequence protocol and the claims can be essential both individually and in any combination for realising the invention in its different embodiments. The disclosure content of the claims is referred to herewith.

The application's sequence listing, which the Patent Office published only in electronic form, follows.

SEQUENCE LISTING (64 sequences)

SEQ ID NO: 1 - DNA, 4731 bp, Homo sapiens
agtcgaccgtggaccgcgctgcgagcctcggagacgccgtagaaggagacctgcttccgggactggaccaggcgcctgcgactcttctcagacgccgacgtgcacgagtgactactattaattctatttaaaatgggtgtaaagaagaagaaagaaatgcaagttgctgcgctgaccatttgccatcaggaccttgaaactttgaaatcttttgctgatgtggaagggaaaaatctagcttctttgctgttacattgtgtgcaactcacggatggagtgtcacaaatccattatattaaacagattgtgcctctgctggagaaagcagataaaaatggcatgtgtgatcccactattcaaagttgtttggatatcttagcaggcatttatctttctttgagtctaaagaatcccttgaagaaagtattggcaagctcactaaatagcctgcctgatttttttctacctgaggctatgcaccgttttacttctcgtcttcaggaagaattgaatactactgacttatactcttacaggaaagttactgacaatatttcttcctgtatggagaactttaacttgggtagagcaagtgttaataatctgcttaaaaatgtgcttcattttctgcagaagagtttaattgaaatcctggaagaaaatagaaaatgtgctggaaatcatattattcaaacacagttgatgaatgacttactggtaggcattagagtttcaatgatgttagtacagaaagtacaagatttccagggaaatctttggaagacttccgattctcccatatggcaaaatatgtgtggattgctgagtatttttaccaaggttttaagcgatgatgatctgttacagactgtacagagcacatctggattagctattattctttttattaagactatgtttcacccgtctgaaaagattcctcatttgattagcagtgtgctgcttcgttcagtggactgcaccagtgtccccgagtggtttatgagcagctgcaggagcctctgttgtggtgacatctctcagtcagctgtcttattcctctgtcaggggacacttgccatgttggactggcagaacggaagcatgggtcggagtggggaggccctgctcttggatactgcacatgttttgttcaccttgagttcacagattaaagagccaacgctggaaatgtttctgtctagaatcttagcatcctggactaattcagccatacaagtccttgaatcaagttccccgagcctaacggacagcctgaatgggaattcaagtatagttgggagacttttggaatatgtctatacccattgggaacatccattggatgctctgagacaccaaaccaaaatcatgttcaaaaaccttctccaaatgcaccggctcactgtggaaggtgcagatttcgtccctgatcctttctttgtggaattgactgagagtcttttacgattggaatggcatattaaaggaaagtacacgtgccttggttgtttggtagagtgcataggagttgaacatattttggctatagataaaactattccatctcaaatcttagaggtgatgggagaccagtcattggtaccttatgcaagtgacctcttggaaaccatgtttagaaatcataagagtcatttgaaatcccagactgctgagagttcttggattgaccagtggcatgagacttgggtttctcctctcctttttatattgtgtgaaggaaacttggatcaaaaatcttacgtgattgattattacttgccaaaattattaagttacagccctgaaagcttacagtacatggtaaagattcttcagacttctattgatgctaaaactggacaagagcaatctttcccatccttagggtcttgtaatagcaggggggctctgggagctttgatggcatgtctgcgaatagctagagctcatggacatcttcagtctgcaactgatacctgggagaacctcgtgtctgatgcaagaataaagcaaggcttaattcatcagcattgccaagtaaggatagatacattaggcttgctttgtgaaagtaatcggagcacagaaattgtttccatggaagaaatgcagtggattcagttctttattacatacaatcttaacagccagtctccaggagtgcggcaacagatctgttctcttcttaaaaagttgttttgtaggatacaggaaagttctcaggtactttataaattggagcagagtaaatccaaacgtgaaccagagaatgagttaaccaaacagcacccttctgtttctttacagcagtataagaatttcatgtcatccatttgtaacagtctttttgaagcattgtttcctggatcttcctactcgactagattttcagctttaaccattttaggttcaatagctgaagtttttcatgtcccagaaggcagaatttatacagtatatcagctgagtcatgatattgatgttggtcgtttccaaacactaatggaatgttttaccagcacttttgaagacgtgaaaattttagcatttgatcttctgatgaagttatcaaaaacagctgtacattttcaggattcggggaaactgcaaggcttatttcaggcagcattggagctcagcacaagcaccaaaccatacgactgtgtgacagcttcctacctgctgaacttcttaatctggcaggatgctctaccgtcatccttgtctgcctacttaactcagcaagttgcatgtgataatggagataggcctgctgctgtggtggaaaggaacacattaatggttatcaaatgcttgatggaaaatcttgaggaagaagtatctcaggctgaaaattctctgcttcaggcagcagcagcatttccaatgtatgggcgagtccactgtataacaggagctttgcagaagttatctctaaacagcctgcagttggtgagcgagtggagacctgtggtagagaagctccttttgatgtcctacaggctttccactgtggtgtctccagtcattcagagctcatcccctgaaggcctcatcccaatggacactgattcagagtcagcaagccgcttacagatgattctgaatgagattcagcctcgagatactaatgattattttaaccaagccaaaatattgaaagaacatgatagctttgatatgaaggacttgaatgctagtgtggtgaatattgatacttctacagaaatcaaaggtaaagaagtaaaaacatgtgatgtaactgcgcagatggtgctggtatgttgttggagaagtatgaaggaagttgctttacttttaggcatgttgtgccagcttctgcccatgcagcctgtgccagaatcttctgatggattattgacggtggagcaggtaaaagaaataggagattactttaaacaacaccttttgcagtccaggcacagaggagcatttgaattggcttatactggttttgtgaaactcactgaagtactaaacaggtgcccaaatgtgagtctgcaaaagctgccagaacagtggctatggagtgttttagaggaaattaaatgcagtgatccttcatctaaactctgtgctacaaggcgcagtgctggaattcctttctacatacaggcactgttggcatctgaaccaaagaaaggcagaatggatttgttgaaaataacaatgaaagagttaatctctttggctgggcctacagatgacatacagagtacagtcccccaggttcatgctttaaatatccttagagcattgttcagagatacgcgcctgggagaaaatattattccttatgttgctgatggagctaaggctgcaattctgggttttacatcaccggtctgggcagtgcgaaattcatccacacttctctttagtgccttgatcacaagaatttttggagttaaaagggcaaaggatgaacattccaaaacaaatagaatgacagggagagagtttttctctcgtttcccagaactctatccttttcttctcaaacagttggaaactgtagccaatacagtagacagtgatatgggagaaccaaatcgtcatccaagcatgtttctcttacttttggtgttggagagactctacgcttccccgatggatggtacttcttctgctctcagcatgggaccttttgttcccttcattatgagagtcttgctctgttgcccagcctggagtgcagtggcacgatctcggttcactacaacctccacctcctgggttcaagagattttcctgcctcagcctcccaagtaacggggattacagagggaagcaagacactccaccacatgccagccaccactcatcccagcccagctgatcttcagaaggccatgaacttaaaggaagtgagtccacgccatcggacacagaggccacacattttaaaggggtgactgctgccattaagcataaagtcagcttttcctggtaaggaaacttaaacgatggccaaagaacagaagaggaaagacagtagtaactcagtgacctggctcccaaagcagtgaatttccctggaacaacatggttaaggttcttccaaagtataactaaaaggtcagcatcagttaaaaaaaaaaaaagtaaaaattgagtattaaatatctctatagtaataggaaattactattgtatgtaattatcacaatacttcatgagtaatatactttatatttccagtgaaag

SEQ ID NO: 2 - protein, 1387 aa, Homo sapiens
MGVKKKKEMQVAALTICHQDLETLKSFADVEGKNLASLLLHCVQLTDGVSQIHYIKQIVPLLEKADKNGMCDPTIQSCLDILAGIYLSLSLKNPLKKVLASSLNSLPDFFLPEAMHRFTSRLQEELNTTDLYSYRKVTDNISSCMENFNLGRASVNNLLKNVLHFLQKSLIEILEENRKCAGNHIIQTQLMNDLLVGIRVSMMLVQKVQDFQGNLWKTSDSPIWQNMCGLLSIFTKVLSDDDLLQTVQSTSGLAIILFIKTMFHPSEKIPHLISSVLLRSVDCTSVPEWFMSSCRSLCCGDISQSAVLFLCQGTLAMLDWQNGSMGRSGEALLLDTAHVLFTLSSQIKEPTLEMFLSRILASWTNSAIQVLESSSPSLTDSLNGNSSIVGRLLEYVYTHWEHPLDALRHQTKIMFKNLLQMHRLTVEGADFVPDPFFVELTESLLRLEWHIKGKYTCLGCLVECIGVEHILAIDKTIPSQILEVMGDQSLVPYASDLLETMFRNHKSHLKSQTAESSWIDQWHETWVSPLLFILCEGNLDQKSYVIDYYLPKLLSYSPESLQYMVKILQTSIDAKTGQEQSFPSLGSCNSRGALGALMACLRIARAHGHLQSATDTWENLVSDARIKQGLIHQHCQVRIDTLGLLCESNRSTEIVSMEEMQWIQFFITYNLNSQSPGVRQQICSLLKKLFCRIQESSQVLYKLEQSKSKREPENELTKQHPSVSLQQYKNFMSSICNSLFEALFPGSSYSTRFSALTILGSIAEVFHVPEGRIYTVYQLSHDIDVGRFQTLMECFTSTFEDVKILAFDLLMKLSKTAVHFQDSGKLQGLFQAALELSTSTKPYDCVTASYLLNFLIWQDALPSSLSAYLTQQVACDNGDRPAAVVERNTLMVIKCLMENLEEEVSQAENSLLQAAAAFPMYGRVHCITGALQKLSLNSLQLVSEWRPVVEKLLLMSYRLSTVVSPVIQSSSPEGLIPMDTDSESASRLQMILNEIQPRDTNDYFNQAKILKEHDSFDMKDLNASVVNIDTSTEIKGKEVKTCDVTAQMVLVCCWRSMKEVALLLGMLCQLLPMQPVPESSDGLLTVEQVKEIGDYFKQHLLQSRHRGAFELAYTGFVKLTEVLNRCPNVSLQKLPEQWLWSVLEEIKCSDPSSKLCATRRSAGIPFYIQALLASEPKKGRMDLLKITMKELISLAGPTDDIQSTVPQVHALNILRALFRDTRLGENIIPYVADGAKAAILGFTSPVWAVRNSSTLLFSALITRIFGVKRAKDEHSKTNRMTGREFFSRFPELYPFLLKQLETVANTVDSDMGEPNRHPSMFLLLLVLERLYASPMDGTSSALSMGPFVPFIMRVLLCCPAWSAVARSRFTTTSTSWVQEIFLPQPPK

SEQ ID NO: 3 - DNA, 85873 bp, Homo sapiens
aaagttgtacagacataggctttgttctcagggagtttataagatttgtttgtctctgttaaaaagaaatatggatggtgctttatcacattttactagtccagagagcacttttacatgtagcggagagaagccatagttatctcccgactctccagagttaccacttaatgatgtttgtcagaaagacaaactggctgcctgtagggtgaggaagtgtcaaagaagataatgaaagaaagaaaagcaacaaggaaaatgtaagaggggttagtggggactagtttggggaaaaaataaactgtaacttttcaactcagatatgttttctttccttcttaccaatatgttcagcaaaatattattttgaatcatgttcctttgggaacacactttgggttctatgtttcccataataagggtacctggccatcatgtccactgttccccatgcatacatagctctgttcttacactcacgatgtggtatcacagccatgcgtttttatggtgatcggcttcactagactatatgctcctcgagcgcagagactgtcatatttgtttatgtctctagcaagactctgtctctgctgaatcccagaacaaagagatttttattttattttattttatattttgagatggagtcttgctctgtcgcccaggctggagtgcagtggcacaatcccagctcactgcaacctccacctcctgggttcaagcgattctcctgcctcagcctctgagtagctgggattacaaggggtgggccaccatgcctggctcagttttgtatttttagtagagacagggttttaccacgttgtccaggtgggtctcaaactcctgacctcaagtgattcacccacctcagcctcccaaagtgttggggttacaggcatgagccactgtgcccagccagagatagttattttatatgttattatgctaagggtagcatttctaccatgagacatgacagcacacgacaactttcccatctgagtactctgtgaatattaccttggattttcccaagaagaaactgacatgtacccttgagtctcaaattcataaattcatttccattgaccctaaataaattttatcgctgactaatacaactattgtttggtaggggcctccttagagaccagacttgggtgttagaggggaagaaaatcttacctctcagttgggattcctttaaattgaattagcctatatttagatacttttagtgaatatatccttggtacatggcctcttcatatagaaacctttaaactaggaggttttggtcaaaaatcctgttccctactcactcttccccattttctttctgtgttgttccatggggctggggtatggttgttcatatttttatctactggtgaccccagcccctggtgctaggcttgtctgggtccctcaggatatgaccttatctcacagcactgatcacaggaattaatctataatgttttctttcctcccttgccatataatctccacaaaggcaggaatcttgttcattattgtatcctcagcacttagtacaatttctggcacatattaagtccttgtctactgtattttgaaatacaatggaaagaaaaccccagatagcatattccttcaaaatcctctgtgacctcctgaccactttgctcagatagaattccttatgcagttggccctccatacccgcaggttccacatctgcagattcaaccaactgtggattgaaaatatttggaaaaaagaaccaataaaaaataatatgggctgggtgtggtagctcacacctgtaatcccagaactttgggaggccaaagtgaaaggattgcctgaggccaggaatttgagagcagcctgggcaacatagagagaccctgtctgtacaaaaataaaaataaaaataaatagctgggcgtggtggtgtgcgcctctaatcccagctactcaggaggctgaggtggaaggatcccttgagcccaggagtttgaggctgcagtgagtcgtgatagagccactacactttagcctgggtgacagcaagactctgtctctaaaataaataaataaaacaatgataaaaaataagacaaataaaaaaatacagtataacaactttttttttttttttgagacagggtctcgttctgtcacccaggctggagtgcagtggcacaatcatggctcactgcagcctcgacctcctgggttcaagcgattctcccacctcagcctcctgcgtagctaggactacaggtgtgtgccaccacgcctggctaatttttaatttttttgtagagacagggtttcaccatgttgcccaggctggtctcgaactcctgggctcaagggatcctcctgcctccacctcccaaagagatgggattacaggcatgagccatgacacctggccataggaactatttatacagtatttatactgtattagatattataagtcatctagagatgatctaaagtatacaggagggtatgtgtaggttacatgcaaatactatgccattttatatcagagacttgcacatttaggaattttggtatctgagtgggtcctggagccaatcccagggaataaggagggatggctgtactacattcatttcttgttcaccagtagttcctaattgaggagtgcggagggtaggggaggcagagcctatcagagtcactcggtaacttctgacattatatgtcttccacgggacattttgatgggccatccatccactcaattaggagtatataaaaaacctggggtttgggacagtttataaaaagcttcctaaatgctgggctcctgttgtatgcatacattagctcatgtattaaactgttactatactatgatgttggtttatatcagttattctactcgaatataaattatatgagtaacatgttttctcatctttgttcctaggtgtaacaaaatacacatagtaggttaacaataaatgtttgatggattaaactccaaagtatcaggtttaaaaacagacagaaaatgagacactatgtccattaggaagtttgggaaaatgatcatgagaaaagcactaagtaagaaggcgtattaaaagaagaaggcattctggtgtaaaactcagagaaaaccagttatcctataacaaaatagaggtgactagaatcaccaagtgtctgttgctcctgaacttttgttatttcacagaccacacaatactgtctctttattcaaggaataattgttgaatgactattgtgcgccaggcatggttctaagctctgattcagtttttacaggtaagaggctataatcatatgcaaaactttacacacctagaaaagcaattttttcctaatgggtaatcaaaaaagttaatttaaatggacaaacagccaaagatagccacttactacatttactagtcttgcttttctatcacctaacaaatataaccaaaaaataccccgaaaaaccattttagaattaggatatattaaagtgagatccctctgctataatctcactaaaacgtatttttgtaagttgaagttccccccaaaggctaactctaatgaataaattatctgtattgttaaatgcccatgctacaaattaggttccatttaactaccagtgcaaccaattatataggtgattttaacatttttatacaccagaagttcataaaaggaatgaaaaatcgatcccatttggtgagactaaattcccataaaacatacacaaatctgaaattgtacagaaaacaaggatttttatttgcctactttttttttttttttctgtctttcagctgaggcacgcataccttttttaagggggaaaaaagccagttttattatttcgttgcttttgagtcccacataattgtacctatctacctcacgtgaggtgatgagaggaggcacaggaagtgtttaacacagtgctaggtgcatggcaatgcttaacaaacacagcttttattgctgtggtcttggtaactatggctgctgtgggttctagaccaggctggtagtcatggcacgctgacctctcccacagagaaagaacagaatctgaaaacctaatctatgtgtccatctgtctgcctatctctatttctatctttccatctttaaattgtttgtgagatggtgttttttagttaagtaattcttgagccttaggttctacccttcatgtggagaatctgacaaccaagaggaggaaagcgaaggaggttgggaggtgtttcctgaaagactgaagtcagaccttagaaatagaagatgaacattctgcattgggggtcagaactataaaggctgagtgtactcatatacaagtgtatttttccaaatcttctaccactgctgattaatcttaaaaggaaaatgcttcatgtcttactgtgagtcactgagcaagaacttttggcctctctggaaagcaagggaatgaatactgcactgaatgcagtcaggaagcttaatttctagtttcagctcagtgacaaactagctatgtggctttaagaaaattactgaacttctctggtcttcaactgatttatttactgaatgaggaacttagaaaagaagattctaaagtttccttcctctagctctaaatttagctctaaagttctacaaatgtctacatagtactcaagaaaatgctctgctctctttttaaaagcagtatttgtctagtttttgaggctcaaaaaaaattacattctgtctgttctacagatctggcacctgtcacacagagcaacttccagaacactggcacgcagtttcctatttggaataattcatcacctacagagaaatctggtatcttggtaaaaaaaattatccatatcagagctggtaggctcccttcaggaagactgggtttgatagagactcattaacttctgggaaagcatattggcattcctttatacaacacacttctattgagctgaatgtagctactactagcatgttatagatttgtattgtgtatttagtactgatattgctgaacacacaaacaccaagcacatggaatagttagatgtcctgctttttggatctgggtataacgctaagaaacaattaatcggcatgtttttaaaacatctacctaattgtagaagcattaaagacaaatgctacttaattactaaggttaattaaagcaggttttcaaaataataaatcaatagaaaataacagaatgaaataagacaagtcttatttttgtctttccacatctaagggatgaatttgcaatcattatcaggcttttgaaaaatagtaaggctatgtcttatggtcaatttttctactttttatatgtttgttgcatacaaacaagaacatgtgctattgccaataagttgttttcccatctctctttaaaattttttttttttttttagagacagggtctttctcgatcacgcaggtgggagtgtagtggcatgatcgtagctcactgcaaccttctgggctcaagcaatcattctgcctcagcctcccaagtggctgggcccacaggcacacatgaccatgcccagctaattttttttttttttttttttggtagacatgggatctcgccaaaactcctggcccaagtgatcctcctgcctcagtctcccaaagtgctggaattgcaggtatgagccactacacctggctcacctctctttctttccttccttcttttcctcccttcctttttccttttttccctccctccctcccttccttccttccttcctcccttccatcctttctctttcttttctttctttctttcttttttttttaaagagacagggtctcattctcttgcctgggctggagcacagtagtgtgatcttggctcactgcagccttgaacacctgggttcaagggaagctcctacctcagcctcctgagtagctgggaccacaggcatgcaccaccacgcttggctcacttctctttcttgagggagaaaaaccaacttgtgcctgctggaggttctgcaggatttggcaatctaataactatccttttgtagttcctctaaaggaaaacaaggagcaactttagcactaatattaaattatttttatgcagaggtaccatttttcacactatttgtagaggacatttaaacattttcttaggtttctttcaaaaatgaagatgagcaaaacaccaccagctcaccttctaactcaatctctgattccctgaagtcttcctgacaacctttaattcattcactgaacacttcgttgatgcaacactgtgctgcacagatggggctgggggaaaggatggaaaggacatgtctggtaggggagactgggtatattacacagatgagtctttctctagtgtgcctctctgtactggctctggcctttctgcccaggttgaaggttctgactctactattacctcctctttaagctatctttcctccaccactgaacttactgaaagagttgttttcactccgtctgtgtttgtcactttctattcacttctcgatctactgcagtctagctttgcgctcactgggatttaccaaaactttgtaaaaatcctgaatgcttttctctcggccagaactaatggcctcttctaagttctcaatagacttgagctcttcagtattctcccagcctttaattctggtgaccatctccgccctcttatttccaaaatttcttgtcctggttcctgctgttctgggtcctctaacattctgccagctgctctccagatctctctgatggtgcctctcccttagcttgtattctgtggtccctagtgtgacctctctaacctacaatgggtgctgatgattcctgctctctcttcactgaaatttggagccttatttttcacatcctcctatattcctctatacgtagttgctggatactctataggcatctctaacacaatataaaactgaatttaaaattttctcctccaaactggctcttattcctgtgttcctctcttggttaattcattctatcacccaaattagatatcctaaataatctttgacaacttctctcccttcaggcgcttttattcattggtcactgctctgatatttctctcaatttcctttcttctcacccttctcaatgtcttatttcctaatattgcattggtcttcagatggatttcccaattccagtcttttctctatcatttttactgctatcggtatttttttttttttggtaatatgtatctgatcactctcttgctttttaaggcagaatgtgatatcacaggaaggtatgaaacacatagaaaaggaagagcagggaatcagaaaagtctcatgggaaggaaggcatttgaatgcagccttgaatgtcaggaagaatttccacaaggaacagacagacgcatcaacagaggcccagaggtatccaagcataagccattttccaggaacagcaaaatgcagggtttgcctgaggtgtgagtggaaagtgggcaggggtggggagaggaggtgggctccaacatgggcggttctggagtccacgcagggtagagggacagggcagctggagcaaacatgtactgccacatgcattaggagtttgttaccttttctgaaagttaagatttgggtaatttttctttacacaaccaagaagactaaagaaaaaaaaggaataggttagccagacgcggtggctcacgcctgtaatcccagcactttgagaggctgaggtgggcagatcatgaggtcaggagatcgcgaccatcctggctaacacggtgaaaccccgtctctactaaaaatacaaaaaattagccgggcatggtggcaggcgcctgtagtcccagctactcaggagggtgaggcaggagaatggtgtgaatccgggaggtggagcttgcagtgagcctagatcgcgccactgcactccagcctgggcaacagagcgagactttgtctcaataataataataataataataataataataataataataataataataaaaaggaataggttaaagttgaaatctagtatttgccattcagaatttttccttttctcaatatacactagagctgctgtttgcaaggcactgagagaactaccttaaaaatgttgagtgtcacaaaaatttgtgaaatctttttttctggatttttatgaagccactgagaaactattttgaaagttgtcagttttttttaaaaaattacaaactctctctcatttatataataagacatcctagtcagcaaagctaagatttcaatagtttttaaatttatgaaaaacatatttttaaccaaatctcaatgttatagagaaaacctaactgaatgattcataaataacatgtcaattcttctctagattattttcttaaataggtcaggtgcagtggcacatgcctatagtttcagcaactccagatgctgaggtgagcccagcctaagcaacacagggagactccatctctaaaaatagtaataataaatacagaaaattttaaaaataaaaagggcacttagcctaaacttactattttattatttagttcatacattaaaaagagctctgaatatgaattattcactagtcacaattctttttttttttttttttttgagactgggtcttgctctgttacccagactggagtgcagtggtgcaatcatggctcactgcaacttccaccccctgggctaaagcgatcttcccactccagactcccgagtagctgaaaccacaggcacaagccatcacgcccgactaattttttgtagttttagtagatatggagtcttgtcatgtttcccaggctggtctcgaactcctcagctcaagtggtcctctgacctcggcctcccaaagtgctgggattataggcatgagccaccatgcctggcccacaagccaaaattcttaatgactaaataattttattaaaaataaagaggacaaggccagtgtggtagctcacgcctgtaatcctagcactttgggaggctgaggtgggtggatcacctgaggtcaggagttcgagaccatcttggccaacatggtgaagccccatctttactaaaaatacaaaaatcagctgggtatggtttcgggcacctgtaatcccagctactcaggaggctaaggcaggagaattgcttgaacctgggaggcggaggttgcagtgagccaagattgtaccattgtactccagactgggcgacagagcgagactccatctcaaaaaaaaataataataaaaaataaagaagacatatttttaaaatgcaattactataaaggacttggcagcaggattttaaaacaaaaatgactactttgaaaatctataaaaatgcatgcaagagcccatttgactaaagaagcaacattatccatgagtctttttatcaagattctgcagacaccagcttcactaacaaagagtagttgatgcaatgatcacttggtaagttacatacaccgctgagtggcctaggaagtgggtctgtatttctgcttcattttcattttgagctttcctctaagggcagtgtctagacacagtagtgaattgattgtgcttgagatgactcaggaaggcttctgagcaatcggtggaattaacccatggtccagaaatgatgggttgttaaatgaccaaaataattaagaacgtgtgtttattttcattacttgcaggaaaaaacatatttctgaagcatatcaatcagtccatcacctgggtactttttctacccaatgctgaaagtgaatatttgagaaactatgtttctaactggaagaattctgaaactatgttcttctacaacatgtagacgatgtgtcacaatgaaaatgaaagttccttctgaagagctgtaaccctacatagcctaggatgccatttatactttctctagcccagaggctctgtatttctgctctcaggctacattactacataaccatcaaaccaactgcccgaaattgctgagcaattgatcataacatacagacctgattcagatatataaattacatttttatttttatcgtaccaaaacatacaggtgaaaactttcaaattcaggcaactgacatgccaggtgcctacctatctgtgaagaccagagcactgtaagacacggaatagctggttgaaaagtgaaaaatccagtgagttaggttgtttgattatacagaatcatagaattttcaaagtgaaaggacatggtgatcactgatttcagtgactatccaacaacattagcaagagcccctagggttccctaccagttccttcagaagcctccttcaaagctgtgagtgcatggccaaaggggaagctacattcatcaaccagactaatcagagaccagggagcagaaataaggttaacacggaatggagtacatttgctttgggggacgttcatgttttcttgcgcatactgaaaacagctgggtgctgattttggtataacactcagagcctcttttgataaaaaggcattctatatgaatgaaaaccctgttggcttcacattggtcaaagcaatggattttaaatagtgactcaacttcctagaaaactttgtatttagaaatgttttcttcatacagctaacaggcaaaactaatcaaaaccttgttgttagtctgatgtttattttctgtgcagcaaacaaactcccataaaaacctctgaggttttcttagttatgtttgcaattttttaagtgttgaactgcctaagtctctgatgtcatgacacttaattcatatattttcttgcttttgctagaactgaacaaacactccctatcaagattgaccctctctagaaataaaataaattgtcatatgaagtcaaaatatgacctatcaagtttatgatagctttctttgacatttatgggaggagaaaattataccatccatactacataggttggggtttaaataatatttgcctataaacaataagcaattgcagattgattttaagtaaacgtatgcaatgcctgtaagcaacaggaaatatattttacatcaatgtatgcactgcctgtaagtaacaggaattatattttacatgaatgtgtgaagtgataattttttaataggcaaaaattagtgttaaaagcggaactggcatgctttcctaggctgtctcagtgataatgacctcaaagtcaatgatttcttcatgaagatgaaataagtttattgcaacttgattgcatcacctaaaatacaacccttgacttggaagcttgcccttatgttttatgaggtctgaaataaaaaggaaactgatggaactgaaccagcaaattattttgcaatccatgactacagttgtatacagcagatgtagtcaattgttgaggaaagttggaccaaatttccatcctgttcagtactgctgatagctctattcaaaatacattcttgcctttagaggaactgacccattagtaatcatacagatagaattttgtgaactatttttaaagggtaggttattaatcaatgagtgactctcaaatatcttgatggtttccactgtgaaaaccaagtatctgcatgatagagcaaaaatttaattttctcagatgctttagagtacatatagatgaagactgccttcttactagatcagttttgagagagatgaaaacaaaagaaagaaaaaataggatagctgatgaaatgaaacttcaaatttaatttgatcatgttggcattttttattccttgagtgcattgaaaataactgattaatactagacacatataatactatcaagttacacctaaaatttattttgtcagccaggcaaccaatcagaaccaaatagtgaccaagaattattttttcaaacacgtttgtcttccaggaccttactgagttagttccacagatcatgaaaacatgggtcttttctcaggtcttctacatcatttcccttaagttgacacccaaagtcataagcttgactttagacacaggtttcaaaagtagaaagttttattctcttatgtttctatggctttgaagttttgcagaactataaaaataatttgttttaccctttccacaactcatggacgttccttgaagtgaaggaaacgaatactcgtctttgcataataaacagcaaaaaaaaaaaaaaaaaaaaaaaattaaatgaatctaaattctcatatgccatttaaagtttcagacccagacatcttcaggattttcttacatttaaagcagaacgacactactgatacacaaaagtaaattttaattctgtttttaatgcatgaggcaatataaaaattaatcatgatgatcattatatttgttctaacactaaagtttttcccataatcccccagatttttcaagtctcttttctcctcatggcagatgcccaaccacagagagaaaggttctataataaaactttaaaaacactgacctaaaagagaaatgttttatcgccatgcaatattctaaattctggcatttggtggaaaaactgtacacatttttggcaatggctttagtgtccactggtctggcagctataatgagaataataaagtatatggtgatgactgtttacttaccattatgagacatccccactgcaaggcatttctgaaaccgacagtactgacatttatttctactttttttgtggatccgacagttaagatcacatctgtcatagataagcttcaatctgattgttctccggaagaaaccctgcaaagggataaaaaagaagcaaattttaagtctttatgacacatggaagcagcaacctacagcgaaaggtatactggcctgggaatcagaaaaggcaggttcttgacacgattctgtcactggtgactttagacaagtcacttaacctctctggaactaaatgttctctgctataaaataaagaaccagaggatctccaggtcccttttttagctcttagacactgaccacatccagctgcggctttcattggatcttggctctacatttggttttcggcatgctctaagaagtgctctggatttaatgtaatgcaaataaaacaccgtgtaatcagttaagtctctctgcaaatcattccaacagcatgccccagcctttgtaattgtgctaagcagcctggcaaagttataatcatttcattctaaaacatgatcagggccaataaaaatccacatgtggataatttttttggaattctctatgttgcataatttcctgcagaatttgtttcacttatttatgttgtttaaagtgtgccccatcattgttgtggcttacagacagaaagagactatgggaataacatgagaagtaatcagataaatcctcacaaaatcgactgctatctcaaaatggcaaatatgtcaatttgaggccaactgaatattctgctatatttacatctttggaaagagctgaaaaaaatcgaactggacgtgttttctgactccattttttgggttcatcatattcctattcatttctattgtgttcatcttcataaaacttaattgctaattctttcaaatgtatctggccctgtttggtgcaaaaagcactgcattagtattgctttggtcattgacatgcattttgactttctccaaacgtccatttagaactctggatgagtatgttctgattacttgacagcttcatttaaataattaatagccatctctaagccagcctgtccaaattgaagtcctgaccctcccctacaaactcacttcacttgcggctttctccatctcagcagacgcaacgccatccttccagtttctcaagccaaaatccttgaaatcactcttgacttctttctttcctcaagaagaaagctttctctaaatacacacttgcctatttccttcatcgccttcaagttttgcatctcaccttctcaatggggctaagccaacctatttaatactgtggcctgtccctgccccacctctcttctggaactcttgatcttctttactctgctccagtttttctcctttccaatagcacttatgactttctaacacaccacagaatttacttattattgttttagtgtttattttctgcccctccctcactgctcaattaaaattataagttcctcagcggcaggaatagtctcttatacccctggatggaatccaaatgcctatgatagtgctaaattaaaatttgtggaattaatacagatgtcacgtaacttcctttctgggcctcacctttttcaactataaaatgagaaagcacttccatctctggtagtttgtgattcccaattgtgactgagatgttacaaaggcgataggtttgacaaagtaatcattattctcaattttgggtttgtcatttccttgatctttaagaaaatataggctgggtgtggtggctcacacctgtaatcccaacactttgacagactgaggcggattgatcgcttgagtccaggagttcgagactagcctgggcaacaaggtgaaaccttgtctctataaaaaaatacaaaaaatttaggcaggtgtggtggcatgcgcctgtagtcacagctactactctggcggctgagatggaaggatcacatgagcccaggaggtctaactgcagtaagccaagttatgattgcaccactgcactccagtctgggtgacagagtgagacattgtctcaaaaaaaaaaaaaaaaaaaaaggaagaaaatacagctttatcacatactatgtaaaacaaaataatatactatttaattttgcttgtttggaggctttattaaatggtattatactatatgtagttttctgggacactattaaaatttggtatgaggtttctaacatttaagttcttgttagtgaaagactatgatttactcattttcataattatatagtattccattgtatgactatactataatttattaacctatttgtatgcagatggacgtttgaaatatcaattttttgctattatgagaagagtttctctaaatattcctgtaaatatgtttaagtggcatttctgggttgtacaatgtgtgagtattaaaattttacaagataatgccaaattgttttccaaagtggctaccaatgtacactccccacaagcgctttatgaaaattgtagtctcttccacatttggtgctgtcagacttcttaattttgacaatctgaaatgtataaaattgaatttaaatcttgatttgtatgtccctggcttttcacttcccagtttctaactgtcttttccttaaaactgaattttagacttttttaaaaaatatgctagatattaatctgttgtctgttacagatgttcaaatatcttctctggcttactatccttgaaatgtactttttcagtatttttgtttattcaaccaatagatatttcatttcactctttttgttttgtttgttttttgttttgagacagagtctcgctctcttgctcaggctggagtgcagtggtgctatctcggctcactgcaaccttcacctctcaggttcaagcgattcttgggcctcagccttctgggtagctgggattataggcatgcaccaccatacctggctctttttttttgttgtatttttggtagagatgggttttcaccaagttggccaggctggtcttgaactcccagcctcaagtgatccacccaccttggcctcccaaaggcctgagattacacacatgtgccactacgcctggctcactctcattcttgagagattaccaagtactcagtcattttctcttaacactttgaattccattatccttctgcttccattttgctgttgagaagtctcttgtcaatttacttctaaggtgatctaccttttctctttggttgcttttatactctctatttgtctttagtattcggcagtttaaccgcagtgtgtttgggcatgaatttcttttcatttaccttcttggatatgttgtttatgcattacggcttcacatgttcatcagtactggactccagttagataagtactagactttcttattctagccttcacatttctgaatgcctcttttttattttccatcttcttctcactacttactcactaatattgattgccaaagtaaaaatcagaacagaagcaaaataacatgaaaatatataattacactggcaaaagtaaaaacaaacatttctcactaaagttcattagtgagaacagttctgcactttactcttccattgatcagtgaagaagacatacctctttaatattcaaagatcctatgaatccttcaagaactaaaagccttcaaattccagcagatcctggatagggcatattctttaagacactgttgctttcattctggtaatttctttgcatatctctttcagtttcaggtttttcttctgctgtgtccagtaagctatctaacccttccactgaatttttatttcaataattatacttttaacttttagaagcttcacctttttttcacttggttttcaaatcatcctggttattcctaatagtttattgttgcaagcctatgccctcttcctttaaataattcataatagcttttttatattctgtatcaggcaatcccaatttctgctttccccaggtaggggaagagcagggagtctgtatcagttttcttgttgatgatgaatgtcattcaagatggttagcttctcacatgcttgctgatattatttggaactagtttcttgaccttaaactgggggactcctacaaagtctgaattaggaattcagtagccaggggtgttactgacttatgactatttcagacactattgagaatcctggcttaattcagaagccctacacttagctccttctcacttattgctcagaaaactgctacagccatctgcctttggggcaatgctcaccactgtacctctctgggcatctatcatggggaaaaccctgacctgctaagtgtgcctgcagctcacagcttggaactgagggtatgtttgtttcattttgtttcattgatgttgttttggagagttttcactacctcttgtgagatcagcaatgtcttaaagaatatgcccgatgtagaatttgctggcagttgaagtctctttaattctcaaagggttctgaggaccttcagatatcaaaaagtttttttttcacagatgaacagaatgctaatgtatagaactgttctcattgataaatgttggtgaaaatcctgatgtttgccattgtgatcatagatattttatgatattccttgacttctcttttgattcttgctttttaaagactaatattagtgggtgaaaatgctacttggctagctgacagctggatggctcacagagcgctcagttatttggcatggctaggagaggaaggtttttttgataagagaattattgatcccttccttacaccatatacaaaattaactcaagatggattaaagacttaaatgtaagacctaacaccacaaaaaccctagaagaaaacctaggcaataccattcaggatataggcatgggcaaagacttcatgtctaaaacaccaaaagcaatagcaacaaaagccaaaattgacaaatgggatctaattaaactaaagagtttctgcacagcaaaagaaactatcatcagagtgaacaggcaacctacagaatgggagaaaatttttgcaatctacccatctgacaaagggctaatatccagaatctacaaagaacttaaacaaatttacaagaaaaaaacaaccccatcaaaaagtgggtaagggatatgaacagacacttctcaaaagaagacatttatgcagccaacagacatatgaaaaaatgctcatcatcactggccatcagagaaatgcaaatcaaaaccataatgagataccatctcacgccacttagaatgatgatcattaaaaagtcaggaaaaaaacagacgctggagaggatgtggagaaataggaatgcttttacactgttggtggaagtgtaaattagttcaaccattgtggaagacagtgtggcaattcctcaaggatctagaactagaaataccatttgacccagcaatcccattactgggtatatatccaaaggattataagtcatgctactataaagacacatgcacacatatgtttattatggcactattcacaacagcagagacttggaactgacccaaatgtccatcaatgattgactggattaagaaaatgtggcacatatacatcatagaatactatgcagccataaaaaaggatgagtccatatcctttgcaggggcatggatggagctggaaaccatcatcctaagcaaactatcacaaggacagaaaaccaaacactgcacgttctcactcacaggtgggagtggaacaatgagaatgcatggacacagggcggggaacatcacacagtggggcctatcagggggtggagggttgggggagggatagcattaggagaaatacctaatgtaaatgacaagttgatgggttcagcaaatcaacatgacacatgtgtaactatgtaacaaacctgcacgttgtgcacatgtaccctagaacttaaagtataagaataataaaaaaaagaaaagataacctcaaggttatggttttattgccctgtagaacattaaccattctgaatcttatctcaggattctttctttcagtgactatatattcttggtccttcaagttcttctttgaactagatttaccatcctgcttttccctcgttaatgggttttaaataaatctttgacacatgttcaaaaaaaaaaaaagagaattaagtttaactcttataatggaaatttctgacatgactcagctgatgactttcaaaagtgtatcacattttttgtgatgatccaaggtctttcaatgaataatcattctgaacattatacactgtatatgtaaataaaatcttgaactgaatacacagatcctagcatgcatcttggaacttgcttttactttttttacaccgagttcatgataaccaagtgttttcttgttatgtgactcaaggaatctagagaggaagatgtaaggatattatcgagtgcttttctgtaaaattatttatcgatttacagaacaaggctggcttctccaaattttcttcatattactgatgaagaaacactctaataacacttttttattattttagagtccatagaacaatgtattttcaacaacttactcttctgatgatcaggaagtctgtgatgtggtgtgttagagatgcatcagtcaccatctgagaaaattgttttgtgtatatatttattctaatgtctgcacatttgtctgctagaaagtaacagacaaatttttcatatcatttgaaaaattttctttgatctctccttaattgctttaattttaacaaaacatcagggacaatgagacctcagaatggtgttgttgattttacaatgaaattaacagccctgtgctgggcttgcagttggctttcccatgaagcagtctggcccctggaagttggattaataagctacgactggcaggtgagaagaattaaaactctttctgaagtagggatgaatagacatacaagtggctaacaagcatacggcattcttttgtatacagaaatacaaacttagattacattgtattgtatggtagactgtatttacttatatctttaggtacggctatggttccaaaatgatctttcactaaagataaaaaataggatggaacttaccaaagaaaaaaatatatctccaacatgtaaacaacaaataaatgatagctttccaagctctaaattatatatatctttcagttgctaaaggttttattttacataagtttgcaatattaacatacccaagaatctgtaactatttcaccttaattcaaacccaatctactcattctcatctgtctgactgaatttttggcaagaatcactaatataaacctgttccatttacattgtaaaattgtttaggaagatctaccaaaagttgttttatgctgtgtttattcttttcaatccatagataagcctgcagctttgtggtcaactgtattttaattatgaatataacccacattttactacaacagcaaatgtgaagcttccaaaacacctctcagaaaatacatgcagatgagttaaacacatttgctaattccattttcctggctttttattgcgtattggttataagctaaggagatgtctttactgacagccactggtctaatgcagcagtattcagaatgtggcagcaattttgtctagtttcaaagtagcaaagaatgagtaactgcatttcttcagaatgagactgaaggctttatggttgcaagatccctttactctttttaaaattatagaagaccccaaagagattttgtttatgtgggctatctttactgacatttatcacactagaaattacaactgagaaattattatatacaagaacacataagcaaacattccattagctaccagagctatgtcatcatcctacatcatgtagcttccagaacactccacatacactcctgagagaatgaaagtgaaaaaagtaataaaaatcattattatgaatatagtttcaacttcatggatgccttgaaagggtccaagccccagaccacactttgggaactgctgatgtatacttgaagaagccaaatgataatgtttcattatgtaaccacatcctaccaatatcatctgaatcattttctagatgagaaaacctgagtaggatgtggttaaataatgatatatgcaaatgtacctcacatagtatctggtacatactaagaattcaataaaaatcagaataagaattcaaaaaaagtttcctttttcgacccatcatccatttaggaatcaagatgtcctaattctttcctaactgctgttctatatctttacgccgaataaaaaccccagccgaagcagggtttattttataaggtaaatatttatgaaaaatttattctgtgcaatcagtatacaataaatgctattttattcattgagtatattaaaattattttgaaagactgcatatcaaaatataagtggattcacatattttctttatattaagtagtatattactaaatgtttaaattttccaagaataatatttttcttattcttacctttaaaacgtgtagatgtctattttccctttccaagggagtaaaaccttccttacattttagtctaggaattctggaatccacattttggatggtttgcaaattactgcaggttagtatacaatacgcttagttttcttctatgtttgctttttaatctatgataggttaaggactcccctagagtcttcaggttttattaagtattttttctccctccctgctttctaccctttctaatcctaagttgaaggcacttggatttcctcctctctcttctctttttgctactcttcttccctgcttgcttttaagttttagtgccctcagaactcagatttatcactataaccaactactgacaatgttcttgtctttccattttcagctgttttcagtaatgttagctttccacaaatttgtgactaataggattatggtggaactatttgcttaaaagttttagttttctaagtgctttactagcccataaaaaacaataacttattgtggaaccttaaaccaaccatgctgtttttatttatttatagttgtaaattatcaacatgaccaaaacagaatggtttcttcagataaatatggctcagaatttagcaacagtttactcactcaaaaatggtatccaactcagtaaaaataaactctaactcattaaatctaaaataaaactcaataaaaccacaaaacattcaataaaaaatctaagtcaataaaatgacatgttcttactactcatcaagatcttagataactgacttaatacaatgatttcatataaggtcataaatattttaacttggtttaaattacagaacgaacgggttttagtgttttaaatgaaagcatctcttgccagagtgtttcaaagtgtcattttgaaattacagaacttagagatgaataagaccttgtgtagccaatctaaccaagtcattttacatatggggggcctgatgaaggatacaatgtgtatgtgactggctaatgactttggaaagtggcagagctgacctctggtttgtcccttttcactgtattaggttgcctttagagtaaaaactgtttcaattgaagggactttagagatcatgtaattcagtgtcattttatttatttacttatttatttatttatttttggagttagggtcttgcttttgtgacccaggctggagtgcagtggtatgatcatagctcactgcagccttgaacttctgggatcaagggatcctcttacctaaacctcccaagaagctaggactacaggcatgtgccaccatgcctggttaattttttaaaaattttgtagggatggggtctcactatgctgcccagactggtcttgaacccctgggctcaagtgatcctcctgccttggcctcccaaagtgttgggattagaggcgtgagccaccacactcagccacaatcattttatagatgagaaaacctgggtaggatgtggttaaatactgatgtatgaaaacgttacctcatacagtatttggcatgtagtaagaattcaataaaaatcagtttccttttttggcccaccatccatttaggaaccaagatgtcctaaaactttcctaactgttgttctgtatctttacgttgaataaaaagcccaataagcaggtatttattttataaagtgaatatttatgaacagtttattctgtgcaatgcgtatataataaattagtactatttttgcattgtgtatattaaaattatcttaaaagactgcatatcaaaatatgagtggattcacatattttcttaataattaagcaataaattactaaacgtctgaattttccaaaatacccttttcacaaaggaaagagatgaggataaatagtatctcctttcccacactgttatacctccttacctgtccgtgtatgtggctcacattgatgctggaataaggaaacatgaggcactgctttgagagccaacaccacctaaggagtcagggtctagactgcggtctgccacttactaagggatgaccttggcaagttttactaacctgtaatttctacatctgcaatgtggccataaagaagtccaatcttataggattgctctagggatccaaagatatgcatatataaataatctgtaaaatcttctgtctatacaatattacacggtatagcaaaataaataaataaataaataaataaacaactagagaatgcaggaaatctgcatcctggttccaggtcatcactgtcttgccatgacaccttggagaagtcacctttttgtaaaaatctgcaagatgcaaggattaaattagatcagtgtctcaaagaatcaatttggagaaacaaatgtggggcaaagcagcccaacttttatccactttcttaggctttcaaatcttatatcatcctttgggaggctgaggtgggaggatcacttgagcccagaagctcaaggctgcagtgtgctaggatagcaccactgcactctggtctgggtgacagagcaagatactcttccatgaagaaaaaaaattcatatattgtatcacctaaaaaaggggttctgctgaaatgaaataataaagtttcaacaatttctttgaagactttttttttaattaccttgcatccttcacaagcatgaactccatagtgaaatccagaagctttatctccacagacacgacattcaattgccatgagggagttggaaggctcttcatgaggcttattgtagagctgagtcttctcagaataataaggtggagatgcaggctccactttgattgcacctgtgtatggagacatgtgagaggataattatcccatgaaaacagtcctaaaaaggcaacagggcaagccaccatagtacaccttcatgctgtatttgtattgtttcagtgtaaaagcacagtggaacatgaaaaaacactggagttaaggcaagaaaaagaaaggtttgtaatcacaggcaagttataacatctctaagcctcacctgtaaatataaaatgggaatgagaattaagtctgtggttctatgacccccagtagcctgcaatactacagctgtaacagacaacatagaggatttgagacaaggaagcttattttgctaggaaatgttctgtctttggtattcatcacaatattaaattatacattttatttaaatattccattttataagtactttgaaacaacttgcaaaagaaccacagaaggaacaccactgtgaaaaggtcatggtatgcctagcttgaggtgcatgaaaaatatgagcccaggttaccattagtgttcagtcaaaggaggtggtttgtgaaataatctttgacagagcgtggcggaacttatggaagtaagccctaccttttactagttgggctcagggctactaaatttccatattaggctctaactgaaaaccgcatagataaatataactaagcatattatttatctttaaaagccactagaaatacaggaagttcttacttgtcaagtaatgattgccaattacatagtggtggctttggaaaaccagcatgtcagcccacacatgataaaaatcaaggaaatagcatcacagaaatacattttatctcaaaaagtgcagttctagtttttcttgagtctgatgttttgatgttgatttagttaatggcatgaaaatttatcaataggctacaatgttaaaacaaatttgtgcttaaaagtaggtttcagtataaactcctgaaaggacatactagaaaaaatgtactgtagtagcagtaatatagtgaagataagttatataatacaaagtgacttggaattgttacttattaacttataaggggccaaaataattcaaagtttggatgatggactcttagcctgagatacaactgacagtgtaatcaaggtagaaaatgtccctaagaaggaagtaagcaagaaaggaaagaagagaggaaggaaggagggggcggggaaggcaagattgacctcgtgccagctcccttcctggcatttcatagatacctaatatttcatggataaatgggtgaataaatgaatggtgaatgccttctctattagatttctagtctctggagcattatttattacagggttactgagagatgagtccaattctagtcctagtagtctgaaaagtgaaaataaacatcatactttggtactcttgaagtttcaggtcatacttgtaatctgcaaccactggatctgttcttgtgaatggaatgtcttcgtaatgtggagtagaaatgctggagaagtcaacagtagtgaagggcttgatatcaaaggagtgggagtggtcttccattacggagagatccacggagctgatcccaaagttggtgggccagaatggcatctctgtgtcaaccatggtcatttctgaaaggaaaaatagactagctgtgaagttaagtcctagagaacacagcaatctcacagagtttcagaaagagaaatgaaaagagtctttggcaaagtaatctcatctgggcgctcacaacaacagaaaagaacataaccaccttcttagtgctgtctaggctgttttatgatagaaaggaagtcaccctttacccaggtatcataatagaggatcctgaaacagtgcagatacatacagtgtatccatataaatgcctttttgccaacaggcctgctctcattaacttctacattaggtcatcaattgagtctgttaatgactgctgttatttatttaaaattttgtccagctttattgagtataatagacaaaaatttttaaacttaaggtatacaggccaggcacagtggctcacacctgtaatcccagcactttgggaggcggaggcaggaggatcacctgaggtcaggagttcgagaccagcctggccaacatggtgaaacctcatctctactaaaaatacaaaaattggccgggtgtggtagcacgcctgtaatcccagctacttgggagactgagacaggagaatcacttgaacctgggaggcagaggtagcagtaaggtgagatcacaccactgcactccagcctgggtgacagagcaagactccacctcaaaaaaaacctaaaccaaaacaaaacaaaaaaacccaaaaaaccaaaaaacaaacaaaacacttaaggtattcaatgtgatgttttaatatacgtatttactatgaaatgattatcataatcaaggtaatgaacatattcatcacttcacagttacctttttgagtatgaatatgtgtagtgagaacacttaacatctactgtcttagcaaatttcaaatataccatacagtatcactaactatagtcaccatgctgaaggtgacctatacttagcagatgatcaccttagaaggtgaccagagcttatcctgcataactgaaactctggctgatatctccccattgctctcaccctccagctcctggcaaccaccattttactcactgcttttatgagttcgacttttttagattccacgtggatcatgtggtatttgtctttctgtgtcaaataccacccagtttaattctcttagcataacgtcctctaggttcatctctgttgtcgcaaatgacaggatttccttctctttttaaggctgaataatattctattgggtgtgtacatatacatctgtatgtgtatatatgtatgtgtgtatatatatacagatatatactgtgttttcaaaaatccattcatccattgacacttaggttgatttcatatcttggctattgcgaataatgctgcagtgaacatgggagagcagatagctcttcaacatactgattccatttcccttggatatatacccagaagtaggattgctagatcatatgctagttctatttttaattttttgaggcagtccattctgttttccataatgactataccaatttacattcctgccaacagtgtacaagggttccctcttatccacatccttgccaacacttcttatcttctgtgtttttgataacagccattctaatgggtgtgagatgatatctcaccgtggttttgatttgcatttccctgatgattagtgatggtgagtaccttttcatatatctgttggccacttgtatgtcttctttctagaaatggatattcctttatcattttttaactgggttatttgttttcttgcaattgagtttgttgagtttcttacatattttggaatattaattccatatcagatgtacgatttgcaatccataacttcatatcagatgtacagattcccctattctgtaggctggcttttcactttattgattatttcctttgtggtgaagaagtttctagtttgatgcaatctgttaatgattgtttttaaagtgtgcacagggttccaggacaattttactctcttgaaattagaagcccaaaatatttttctctttaggatgaaatttttgctattctacttgtatttataatgcttttgtgtaatagaaaagttggcaaattaaatttaggtaaatgaacttcttctttaattgcatcctaaaataattttgttcttaaaataatacaaaaataaaaaaattttaaagggaaaaatcactcaattattacttctgtactatgaaaaattactcaataatcttttctgtggatacaccttttcttaaagcggagaaagttttccccacattgagaatagaaaggttagagagatatgtggaaacatttgatcacacccgagagtgtcaaaatcagactctagcccagcattaattttaaaccatccccaaaacaaaaacaaaacaaaacagagatagaaacaagaaaacacataaaagacaaaggaaaaatgcttacatggattctaaggccacagaatagcaagtttcatgaatcatttgcccaatatcatgtatgccacatgcatttttctaaacatgatttattgtcacagtaagtgcaacaaaactcttttggttcacttcatgtgaacttgtgagccaccgagggtgcagactggaaaactttctgcaataggtacctggactctgtttacctgacaccagttcattattcaaagtggtgccaaaaaagcagtcataggtattttaaatgttaactctgtggtcaaaaacaccagtggagagctgtgtaaatttaggactgctcacacgggagacagagatgagctgctcataaactccaggattcatcaaatcataggcgtatctttcttgtttgcagtcatatccccactggctaacaaagggcttgtctcatagtaggtgctcgttaaatatttatttattaaatactaaatacattgatgacttaatgagatagctgtgaagtttcagcagaaggggcagggaaggagggaagcaaattggtattgatcaagcacttcccatgtgcccggtacatcctaccttttcttctgcataatctgaaatattattcccactttatagataagcaagctaggaccaaagaagtaaagtgaattgttcaaggtcctctagctaggaagtagaagatgcaaactcaagactgaccctgaaactctcttctgtatatacatactctcttgattctctcattgatgaaacaggcttatggaggaggggccactctcctctgtgtatctgtgcatgggcctcttgcttttcctttttcttttcttttatttatttatcatttttttggagcaattttattttaatgctctcactttaacaccacttgctttttcttaccaagcagattgccaagaaattcactccaaaggcaaacttttgcatgagttgaagattgaagatttcggctgtcatcttcataagaaaaaatgccctgaggccgggtgcggtggctcacacctgtaattccagcactttgggaggccaaagagggtggatcacctgaggtcaggagttcgagaccagcctgatcaacatggagaaaccccatctctgctaaaaatacaaaattagctggtcatggtggtgcatgcctgtgatcccagctactcgggaagctgaggcaggagaatcacttgaacccaggagagagaggttgcggtgagctgagatcacgccactgcactccagcctgggcaacaagagtgaaactccaactcaaaagaaaaaaaaaaaaagccttgaaaatataaacaagactggtcctgtgaatgcgcgtttgtggtttcaagaggactaattaggtaccgtatgggttcacatgtctatctacataaataagtacccaaacaaccttaagttatctgtgtttcagtgtcaacactgcacaccaaaaaggggaatgtgtactggtgatagttaaaggtcattctaggtctcaatgacatccagaaaaaagtctgtgctcctaaggacagggcacccatccaactgtgtcctttgtttcaaaattcgtccaaacctgtctaacccaggtcattccatttactttgtctgtctccttggcaggcttaattttcatttctgtatctacttttcttagtataacttattttcatattaaagtatatttcccttgtctacactgtaatatccacaaaggtgggtttatcacctatttctcactatgctattgcaaagttttctgcatacagaataaaggctgacaaagtgagttaaaggtagtggatatgcttttgtatgaatactgggaaatgaaaataaggatgcacaaatatctggggtgggagagaaattggttgctcatgattttactggtttaattttgctttgtttcatttttaacatacaatttcagtgacttcctatcaatcacagccatgctgctttctttcctctctctctctctctctctctctcccacctccccaacctcacttttaaagagacagcatctcactgtgttgcccaggctggtctcaaactcctgcgttcaagtggtcctcctggctcagcctcccaaacttccgggaatataggcgtgagccactgtgcccagccaaagtcatgcttcttattacaaaagtcatatccctaggggtcgtgtattacattgtggaaattttgggaaaatttttaatgtgaaaatagccatctatgtgttaaggaaagaaggaaaagttcatgtaatttttaaaaatattatatgaaattcctagaaaactctgtacttgtagtacatctcatggctaaaaggatgctgttttctgttttcgttttgttttgcttttcatagtagcctttacttttgtgagagcagttttagggttacataaaaattgagcagaaagtacagagctcttaaaatagcccttccccagcctcctgtcccctctctacaaagcatggttttcccctattactaacaccttgcacagtgtagtatacctgctataactgatgaaccaatattgacacattattaccacctaaagtccatgatttacatcaaggtttgctctttctgttgcatagttctacatttttgttttgttttgtttttgtttttggtggagtctcgctctgtcacccaggctggaatgcagtggcacgatcttggctcactgcaacctccacctcccaggttcatatgattctcctgccccagcctcctgagtagctgggattacaggcgtgtgccaccatgccctgctaatttttgtatttttagtagagaaggggtttcactatgttggccaggctggtcttgaactcctgacctcaatggatctacctgcctctgcctcccaaagtgctgggattacgggtgtgagccaccatgcccagccaagttctatgggttttgacaaagacataatatcatgcattcattagaggatcacacagaatagtttcactgccccaaacataccccatactccacctattcattcctcccttcctccacccaagaatggtatggttttgctgtcctctactagtaagggcatactggtggaaaagcaggagaaacactggccttttagcttggcattcaaggccctctatgtctcagccctaacttactttttcagtcttatttccactggttatcccagacctcgctcccattcttggcatatctggtggctgggcatatcatactatctgcccaggttaaacatgccctgcctcttttagtcatacaggttactgaggctgctgtatcttcttcctactcctcacctcttcatgccacaagcctgtttgtctttcaaaacccagtccaaatgctactttctctgtaaaaccatctatgaatcctccaacttaaaaacactccattctctgtgttcccacagcactttgtacctcctcctttaactcagatataattatctggataactatctccaccattagacttccagtctggagtaaaaggacagcatcttattattctatcttcccatgtgcatattctatgcacagtttttttttttaaccaaattcttgccaattgatgatcatattttatgcagaagagtagagtaaattttcattttgctactaaagatggaaaaataacaatactttctcaatagtttagttttgttaagacttaagttctctccaaaaaatgttaatcttcaacattatcaataaaatacaacttaagccataaccattccccttaacgatgtatattcagttttttctcttttgctgattacaagaggaaggttgtggtcctagatggttttcttatttttctaagttgaaaggacaaagtaagaaagaaaaacagcttgcctcttcatctctatgaaaacattgcccaaacacacttttccccttcccccctgcccttctcccttcccttttactctgggacaccttgacctaaacaatattattccatggaccatagttactgggaggcacagtggttccctagacattttattttattttgacttagagatgggtccagaaagcctgcttctaattttgtctctagaaaacataagctactgtttctgccaagctgtaagttgaggaggtgttttttgttactccgtgcaattacccatgaaagaacaaatgaacaaaatatttgcatgaacaacagcccttctcagtaacaagaacatgtcttaactccctagctggtgacactgagttgtgttgcatcagtggtatatccattaatttcacaacctttagagtgtttcaagcaggctaaagtctttaggcagaacttgtgagcaaaggacatggatgtgtgccattatcttagaccttcaaacttggctttaaatgctattatagtcaatgcgcagacttttcacaatactcaaaggatgaagtagtgcaacaaaaatacaaccaatttcatgcaaaaataaagtaacttctttaatctgataggcattattatttgggagtatggaagtgggttggaaaagatgctaaattgtaaaattgaacaccagaaatatatgctttacctttggggttttatgttgtcccttacgaaaagaaaagaaaagctatgattagaatagctggtaaaatgttacatcttcttcatatttacattagctaatactaacaggacactaaatctgtgcaaagtactacgccaaatattgtgcccggattgtgtcatttaatcctcacaaccagcccgaggaagtaggtgcatttataatttactttaaagatgggaaaactgaggcatggacctggaagtaagtaacttgcctaaaagtacgcagtaactaagcagtagaactggcattgaatccagatggtctgaagctccatagcccacacttgtgactttacactggatactggttagaaaaacattatttcttcctgatcttccagttctatattaaacaattatttaacagttccaacaaatcttcatgaatacctataatgtgccaggcaggcaggggggcaggggatgtactatgaagagtaactctcaaatgaaagctttattggagaaatgtgttcagctaggcaacaagagtacgtgcctgaaaagcctttcataggtcctttgtagttttgttggaaatgaccttaaaagacacttaaccgccgatttttcaatcccttctcatttgtttcagttaatgtcatggtactcataactgtggttccaacttgtttatccagcccatccttactgattcatgcagatcaagatcactctgcagtgtaaactgacctgggaatttactaattcctctcccatcatgacagcgacatccagagacaagaatcatcctgaaacactacagcagaaaaggctgttttgagatcatctgagttctcatttgacagataaagaaaatgaggcaaagtgacctgctcagggtttcctggtgagctagaggctgactggacgggagcccagcttggctcctctgagcctggcattctcagcgctgtgttatcaagttgttactacatgtaaatatgctgaaaatgggacttttaacctttgccacttttcacagatccagatttattttttgggggtctttagtgaatgtatatgaatgtcatcaaatttatgagggaaaaagtctcatgtaaggaaccatttcctggatggcaaattatcacagaataaaatgcgaagaactaaatctgtaacagaatttgtttctaacaaaagtcatgaactctgaattaatcaaaaggcgtagggaatagtcttgaatagtctaataaagtaagcattatcttggtttgtttttacatagtaagtacagatatacaaatgttgtttgcttgctttgtgccgtttgctgttttgaacattaacggtgaagaaggatgggcacagctccatgtcagatgcccgaggttccaatccaaccctattgctggaagttcgtatctcttcatatctaatctccatctgtagaatattaatattgtctccctcctagagttgttgtgaggattaaattagataatgtatgtagagcacttaccatagggctggatacttaataagttctcaataaatataattaatattaatagtataacagtaatttgtgtacacattagtcaccagagtactacagtcatataaaaggtgggctaaaagcctccaacactaccactaggggacaggaagaggaagaaccgccagcaaagccctattgtttaaacaggactacgcctaaaacagatgtcctgttttaaaggcctctggaaaaggagagtccacagctcctcttggttactcattccaatgcttaattgctctttagcagccaggaaagtctatgtcttatctggcatttccccaactgtgttatacatatgttaataatgttcctttaaaaataattaaaaacaaaacaaaaaaaatctggtgatcaagtaaatttaggcaatgctaggttaagcaaggttaaataggtttactgtgagacttcttaaactaacaggctaatgttcacgagaatacacaaaagagagaaaaaagcacagtgtgcaatatttgaggagcttaatatgtgatggaatatggtttgagaaatgatgatctaacctatgttgaagtttgcgactatctcttttttcccattttttaaacatatagttatcatcctctgcatatttgccttttatcacatgtacttgaaacgtattcctgagttgttcctcagtttttctttaaccttagaatgactaagatcaaggatttataaaacagtaacaaaacccaagagagaaaggatttcttaaaccacacagaaaggaacactgtcaagattaataccccttctatagagatgatcataagtacttcctgacaggaaaaaaaaaaagtaccatagaaaggatcaggaatcagaatgacactgaacttctcaacagtaacactggaagctagaaaatcaatagaacaatgttgccaaaattcaagagaaaaaaaaatttccaacctagaattttagactcatccaaatcgtccatcaagtatgagagtaaagacattttcagaatgataaggcatccagaaaagttacctcccacgtactctttcccagagttctccaccagaaccaagaagagaaaagatgggaccaggaaacaaaggatctgaaagacaggagagaggtggaaggtagtcccaggctacagatacagagcagcctagagaaaatgcaggaggaagaaggccaggtgggatcacctgagaaaccagaatgcccgatatgtctgaccactttcagaggagtttttattactctgtcagagagtttgaggatgaattagtgatgagtacatagcaagaaatgacaacaaaatgagcaatgactaagtgacaaaaattaactccagaaaagtaaatagctaagcaggagaggaaacagaatcatagcacactgcttggctcaaccttaagcagcactttcagttactacaatgtaagcacagacaactgatttaaccccaaattacaagtaactacattgtgaagatggaggggagggagaagtatgtgttttggaaaagggaatatggtagtaaaaggactaaattattatctcccacagtaagaagtcaatggataagaatacaattttaaaaataatagtataagttattattattataattatttttgagacaaggtctctctctgtggcccaggctgtcgtgctgtaacgcaatcacagctcactgtagcctcaaactcccgggctcgagaaatcctccaacttcagcctcccaagtagctgggaccacaggcatgcaccaccactgctggctaatttttgtattttctgtactgatgaggtttcaccatgttgcccaggctgatctcaaactcctgggctcaagcgatgtgcccatcttgacctaccaaagtgttgggattacaggcgtgagtcactatgcctggccattaatgtaagtatgttattctagagataggaaggtaaatgccagaagaaatatgtgaaagaggtaaaatcactgcctatgaggagcgggatttagctgtgggaatgagtatctcttcttcactgaaagctgtagctgtgtacgagtgttatttagataaaggtaaaaattaagctaaaattcactatcttttaattataatatctttccatgatttctcctaacagagggagtaactctatttcttacatgtgttaaagtcctcttaaaaggaattatcatgcaatcatctggaaaattggagaaaattttaatgtagtttcaagtagaatgaaagaaaatcagaaaatggttttgatgcttcagccacaaatggctctccttttgactcaagcatttaaaaaataaattctaccaactcacttcttttccttcacatagtatcctgagttttgtttagtgaaggaggaaaagactctggaacccatcagcagaaatacaatttagtaacaatagctaacaattattaagtgcttgttgtaaacagtcctatgttgttatacacaagtattattaccacctaacagattaaaaatattagacataaaaaggttaagtgacttgcccaatgttaaataggtattggggctagagtttaaattctgtcatggtttctctgaatatagaatcttttattttgggcaccatgaattaagaaaatgattagaggctgggcgtggtggctcacgtttgtaatcccagcactttgggaagacaaggtgggaggatcacctgaggtcaggagttcgagaccagcctggcctacatggtgaaaccctgtctctaccaaaaatacaaaaattagccgggcgtggtggcgcaggcctgtagtcccagctacttgggagactgaggcaggagaatcacttgaactcgggagatggaggttgcagtgagccgagttcatgccagtgcactccagcctgggcaacagagagagacactgtctgaaaaaaaaacaaaaaagaaaaagaaaaaaatgaaaactattagaaattaactatttggtgtgtcatttgcttcttcaatataaacaaatgtattttcattttattgtctacttagactatattcaaaaccaaattcaatgtttctgaagtttgatttcccattgatagctttgagattgaaacattccaatatgtatctttagatgcaaatttctttataataagccagaaggtctcacaggaaattttcaaattcagatcaacaaagggtattagaaagaccatgttttttattatattttatttaattttactattattttttgaggcagggtctcactctgtcatgcaggctggagtgcagtggcacaattatggttcactgaagcctcgacctccctgtgctgaagtgatccttccacttcagccttccaagtagctgggaccacaggcattcaccaccacattcatctaatttttttatttttatttttttatttttatttttttttttgtagaggcaaggtatcattatgttgcccaggctattctcaaactcccggactcaagcaatcctcccgcctcagcctcccaaagtgttgggattacaggcatgagtcactatgcttggcccatgttcattttcaaaagcatatttcctcttgcatgagccacatcttgtctagggagtttgcttacgctggtcctgaggtatcaggacacagaaaagattacaggattatgccctcaccaatataaacatttcttctgcttcctcagcaaaaattcattatggtcaaactagctcaagcttggttcctctgctaaaagtaccttcatatatttctaaagggagatattactaataatctgattaggactaaggctaaatctgttgaacagttgctttggtttagttgaaattctactttgtctagtacgtgaagaatgaatgaaagttattcagaaatgaaagaggggtatcattacagatctcattgacattaaaggataataggctctatgctcacaaatttgataatctaggtgaaatgaactcattccttgaaagacataattttccaaaactcatacaagatgaaatagagaaatggaataggcctacatttattaatgaaattgaatcaataactaataaccttctgaaacagaaggcaccggactgggttcactggtgaattctaccaaacatttaaggaagaaattataccaattctctgaaatctctttcagaatataaaagcagagggaatacttcctaactcattcaatgaggctagaattaccctaatactaaaacaaaacagacattacaaggaaaataaaccctatagaccaatctctcatggacagacatgcagaaatctttaacaaaatatcagcaaattgaatccgataatgtatgaaaagaattatacaccatggccaagtgagatttagctaaggtatgtggggttggttcaacattagaaaacaaattaatgtaatccatcacacccatagcctaaagaagaaaaatcacatgatcatatcaataaatgcagaaaaagaatttgacaaaataagaaaacttcctaaacttaggaacatctacaaacaaaacatatagttaacatcataagtaatggtgagaaactcaagctttcccactaagattaggaataaggcaaggatatcttctctcactactgcttttcaacatcatactagaagtcttagctaacgtaacaagacaagaaaaggaaataaaagggatacagattgggaaggtaaaaataaaactgtctttgtttgcaaatgacatgacttctacataaaaaaatccaaaagaacagaaaaaaaaaaaatctcctggacctagtaagtgattatagcaaggttgcaggatacaaggttaatatacaaaagtcataatgctttcctatataccagcaatgaacaagcgaaatttaatattaaaaacacattacccccaaacagacattacattttcctcataatgtctgttttgttttacattagcaccccgaaaagtaaaatacttaagtataaatttaataaaatatatatgaaacctatataggaaaactacaaaactctgatgaaagatatcaaagaatgaaataaatggagagacactgcatgctcatggataggaagactcagtattgtcaagatgtcattcatcccaacttgatctatagattcaatgcaatcacaataacaatcccagcaagttattttgtggatattggcaaactggttctgcagtttatatggagaagcaaaagacccgtaatagccaactcaatattaaagaagaagaataaagtcgaaggactgacattacctgacttcaagccttactagaaagttaaagtaattaagatagtacggtactggcaaaagaatagacaaatagatcaaaggaacagaatacagagcccagaaataggaccacataaatgtagtcagctgatctttgatgaagaaaccagggtaatacactggagcaaagacagtcttttcaacaactgggactggagcaactggacatccacatgcaaaaaaatataataataacaataataataataataatttagacacagagcttattctcttcataaaaattaactcaaaatggaacatagatctaaatgtaaagtacaaaactataaaactccctgaagacaatataggagaaaacctagatgaccttgagcacggataggactttttagatacaccaccagagacatgaaccatgaaataactgattatctggacttcattaaaataaaaaaagtctgctctgtgcaaaacagtgtcaagagaatgagtaaacaagccacagatggggagaatgtatctgtacaaaacacatctgataaagcaggggttcccaacctccaggtccagaccagtaccagtccatggcctgggaggaatcaggctgcacagcaggtgaactgctgatgggcaagcattatagcctgagctccacctcctgtcagatcagtggctgcattagattctcataggaccacaaaccctattgtgaactgtgcacgcaagggatctaggttgcacactccgtatgagaatctaatacctgatgatctgaggtggaccagtttcacctgaaaccattcctgcccaccccagtccatggaaaaactgtcttccatgaaactggtccctggtgccaaaaaggtcagggactactgtgataaaggactgttatccaaaatatacaaagaacgcttaaaactcaataataagaaagtgaataaccctgttttaaaaatgagcaaaatatctgaatagacacttcatccaagaagatatatagatggcatgtgaacatgtgaaaagatcttcaacatcatatgtcacgagagcactgcaaactaaaacaagaagataccactacaaatagaatggctaaaatctaaaacactaacaccaccaaatgctgatgaggatgtggagcaacagaaactctcattcgttgctgatgaatggtacagccactttggaagacagtgtggccatttcttataaaactaaacatattcttaccatacaatccagtaatcacactccttggtaggtacacaaatcaattgaaaacttaagtccacaaaaaacccacacacaggtgtttatagcatctctattcataattgccaaaacttggaagcaccaagacacccttcagtagctgagtggataaactatggctcatccaaacaatgaaatattactcagttctgcaaagaaatgagctatcaagccatggaaagacatggaagaaccttaagtgcatattggtaagtgaaagaagtcaaactgaaaaggccacatactgtatggttccaactatatgatattctgggaagcgcaaaactatcaaaacaggaaaaagatcagtggtagtcagaagtttgggggagaacggaatgaacaggtggatcccagaggatttttaggtcagtgaaaatattctgtatgacactacaatggtggatatgtgtccttatacatttgtacaaacccagagaatataacacgaagagtgaatcttaatgtagactatggactttgagtgataatgatgtgtcagtgggggtttattgactgttaacaagtgtaccacttgggtgcaggatgttgatagtgggggagattgtgcgtggtgggggacaggaagtatatgggaactctttgtacttcctactcaattctgctctgaaactaaaactgccctaaaaataaagttattaattaaaaaataaaaaagaagaagaacggtgtttagatcagaaaaaagaagctggaatgttttcctcggctaggtccccttccacgttttggttttggctttgcagtgataggggaatgaaaataggggagaggagaggaaaaggaaaaatgaaaggaatgatccagaagagtgtgtaatgactcagaaaggagggagccaccgcagatctgccagagtactgtttccctgctgtgcccaccttcaaacactataaaggacttactgcaaatgggaaaagacagatggggtcagggttttaaatcatactttaccactgaaggtcctctagtagcttggcattaccatagggggaaagccactttcttactcagagttgtttagtctggcaaaccatgtgacactctatgctcttttgaaattatgttttcaacttactgtgtcaagcactcttaatgagaagacaagggtcttaagctaaacagatactgagaacaaaagtgtcaaaacagatacagccagatctctagtggttatgagctgatttgaagattttcattagttataccatatagtatcttcaaatgtattacaatatgatattaaagtatacatagtagacacttttcatacttttaatctttctcctgagcactataaaaaatattctaggctagatacagtggctcacacctgtaatcccagcactttgggaggccaaggtgggaggattacttgagcctaagagttcaagaccagcctagacaacacagtgagaccctgtctctataacaattttttaaaaattagctgggtgtggtgatgtgctgtggtcccagctactggaagaggctgaggtgggaggatcacttgagcccaggaggttgaggctgcaatgcaccatgatccagcttggagacaaagtgagaccctgtctcaaaaacaaccaccaccacaacaaactatgaaagcatttgatataattcaacattcactcataattttttttttaaataaaaaacctcttaggaaggaaagggaacttcattagtctgctaaagaaaatctataaaaaacaaacaaataaacaaacaaaaatcctagagtagccatcatacctgatggtgaaatatttaaagccttcctcttgagatcagcaacaaggtaatgatactatcattacttctactcaccactgtactggaaatccatccaatgcaacaaaggaaaaagacaaagaataattggaaaagaagaaataaaactaaaactaacattacttacagatgacatgactgtattttgttgttgttgttcgttttatttatttatttatttatttatttatttatttatttatttatttatttttgagacgaagtctcactctgttgcccaggctggagtacagtggcattatcttagctcactccaacgtccacctctggcattagggcaattctcctgcctcagcctcccaagtagctgggattacaggggcatgccaccatgcctggctaatttttcgtatttttagtagagacagggtttcactatgctggccaggctggtctcgaactcctgagctcaaagtgatccacccacctcagcctcccaaagttctgggattacaggcatgagccaccatgttaggcagactgtgtttttaaaaatccacaaaaaaactcattatagttaataaaataatttagcaaagttgctgggtacaaggtcaatattcaaaaaccaattatatttctataagccagcaacaagtagaaaatgaaatttaaaaattatttttgcaacagcattaaaacaatcaaatacccaggggaaaaaatctaacaaaatatgtgtaagatctccataatgaaaactcaaatatactatttaaaaaaattaaagaataaataagtgaaaggatagttcatgttcatggattgaaggactcaatattgtaaagctttcaattatctcccaatttatctatagattcagaacaattccaatcaaaatctcggcacttttgtgtggtaattgatatgctgagtctaaaatttataaggaaattcaagaggccaagtggcaaggaaatcttgaaggggaagagcaacgctggaggatttatactaccagatatcaaactatttataaagttacagtacttaaggcaatcttaattggtgcaaaaatacaatgcaatagaagagtaagtccagaataaatcccagacctatatggtcacctggtttatgacagaaatgtcactgctggggagtgggcaaaggatgatcttttcaataaacgaagcaggtcaactggatatccccatgaaagagataaacccttgccttacaacatacacaaaagtcaattctgtgtggattatggatctaaatgtgaaatataaaaccagaaaacttttaaaataaaaacacactttatcaaccttggagtaggcaaagctttcttccaaaggatataaaaagcacttactgtaaaagaaaaatctagtatatcagactatattgattagaaatatctgtttattaagtaaacgaaaaagcacacagagtaagaggagatatttacaatacatgtatctgacaaggtatgctttagaacgtttacctaaagtactcaatataaaaatgggtgaaagacttgaacaggtactttacaagaaaggatagccaaatggacaacaaacgctttttaaagtgtttaactttttagacatcagaaaaggggagattaaaattagaatatgataccaacacacccatcagaatggctaacgtgaaaaagacagagaatgccaagtaccagtgatggtgtagaagagctagaacactcatgcacttctagtagaagtatagatttctagagtcctgttcagaactgttggcaacgtctcctgaagctcaacatactctattattggctgaagcatatagctaccagaaatgcatacgctccttcactaagagacctacaggacaatgttcatagcagtactatttgcaatactgaaaaccatctgaatgcccatcaacagtaggataaatatgttgtgatatatttatacaatgaaacactatacagtaatgagaatgaagtacaattacattcaatagtgtgattaatctcacgaataaatgctaagcaaaagaatccagacacaaaagagtaaacaatgtgtaattttatttatataaaattcaaaactgggcaaaacttaacaatgagttagaaattagaatagtcagagggcttctggagtgctggtattgttctgtttttttttttttttgtctgggtgctaatttcgcaagtatgttcacttgtgaaaatgatttggacatttttcctctaagtatattatacttcaataaaagagttaattaagagagaatgttccatatgggtcctaggagtgggggatgacagaaggaaacatgcagacaaaccaagtaagccaacaaaaactcttccagttgtgttaaaaggattgtcatagaattttaggacattcacttaaaaattattcaattcagaactcataaaacagtattaaggccagccatggtggctcacatctgtaatcccagcactttgggaagccaagatgggaggaccacttgaggccagagttcgaaaccagtctgaacaacatagccagaccgtgtctctattaaaaaataacaaaaagagcaaaaagaaagaagagaaaaactgtattaaaattattcttttttaaaaaccaacacaagtattttaataaactatctgtttttgtaaccagcttccttgcacagtgaaggctaaatacatattcaaccaaggacttcaaatcagtgtaaatggcggaagtaaaaattcaaagggtgtacattttatctaaaagagtgaagcaggctgggcatagtggctcacatctgcaatccagcactttgaaaagtgcaggcagtcggatcacttgagatcaggagtttgagaccaccctgccaacatggtgaaaccccgtctctactaaaaatacaaaattagccaggcgtggtggtgggtgcctctaatcccagttactcgggaggctgaggcaggaggattgtgtgaacccagggggcagaggttgcagtgagctgagacggcgccactgcacttcagcctgggtgacagagtgagactctgtctcaaaaaaaaaaaaaaaaaagaaataaaagagtaagtaggaaaagttttgtttttgctttagaactgatatatttggcttgtatataaggcctattctgctttacaaggacactgtatttttaaacaatgcaggaatttttttccccaaattctgaggcctacgtcaagagtcttgtgtttgggaagttactatgtttggatcagctgagtagtcttttgaggcattccatttaaattaaataaagttgggggttaaatccattcaagctacccatttttttataatgttttctttgtatcaacaatctattttataaaccttgcttcttagaagttaccatcatattttactagtgtgtttctcttttccaaacttcctcattttattttctttggcatttttctttctctatatcttcagctcagtaaatgttcaatcagtaatctaaaaccttaaatcaagatagctaatcacctaatactacgtgcaaggtgtttttcaggccttacaagaaacacatagtattgtggttcttgagaagcttaccaaggtgagagatgtttagtagcagaaggaagtacagagaccagactcgtgatagagatagtaagtactttagaaatgtggaaaagaaagatactaacatgtcctgaaataatcagggatagctttctggtagacatggtgtccaaattatgtggagccattgggatgatcaagatttggatggtcattcatattgaaatcccaagaaaaaggtacatgtccctgtcatcaacgtgccccttatattacatgatattgcttaagaaataatactaagtgtatataatagcaaaggtgatgagattttgtatatggcatatacctgaaaattgagttggtttctcctgagttaactgtttacatatcttgggtaattgtggctagaaatgtgactgtatcaatggcaaacagaactctttgtaaatggcaaagacttctgtgtaaatctggccaacccattatcaaactcactttggctcttattagcatcatattttaatccactaagcaaacttgctcaatctatctaataggtctataattttatttacaaaactaaaggcagggctttaggtaaagtatagataatagtaagataatgtccagtgaacttaaatcaggcatactttattgctaatgcaagcaaaataataagaataatgagaatattttactttttcctaaagatctgacttaaaagacccaaggggagacattatgtctgtattaacttccattttaaagatgagaagaagacagaactgacgtgtttggcacctattacatatcaggcaattaatactttaagtgcttcatatattagatattagctaattaaataagctactcttttttaaacattgctagcaaataagtgttttggatgttcaaataaataatggaagtatcaaaaggtgggtagatttgcagaagaagccagggatttgggtaactcacaaacaaatgatgtttaaattaatattcaaatgatattcaatgaatgctactcaaactaatggagggacacggtgcaaattaactaacagataattcaaaacatatttgtgcctggtttgtagcatatccagtacttggtttgtttatattagcattggttttagaataatatttaacatacactaaaattttgtatttatttgctaaatatattccagtctctgaccttaggagatcagcttggtattaataagtcaacaagacctgattatacttattatgtgtttggcatttgtggaatatagaataaaacatggatcttttcttcagtgactatatgatttggcttagggaatacataaaacaggaaataataccagacagtttgaactcagggctaaattgtgtgatagaagccgtaagtgttagaggattctattctttcatttagcaagtattaatgagcaatactattcaggtatttggaatacatcagtgggtgaacaaactagacaaagatctctgccttcatgcggttaacattccagggaggtgaagcagacagtaagcaatacatagaatccaccaataaattacatggcatgttagaagacgataaatgctttttaaataggaaattgtagagtagaggaggaagggcaatggggaggatatgtaattcccctgtcctaggatagggaaggccaaggtcaccctcactctaaggtaagatttgagccaagattatagggaattgacagaggtggcccagagaatgccagaggaagagggtcctggacaggaacaagagctggggcaggtgcacgaaggcaggagagcatctggaatgtggaaggaacagcaaggaggccggcgtgcttggagcagagtgggtggaagagagagagaagaccagaggggtcagctggggtagggcaggaggtaggggccagacttggacttttgttacaagtgaaatggggaaccactgcagggctatgggtggagtgacggatctgactcacatttgagcatcatctctgtgggtgaccggttgagactaggctgttgtgaggttaggatggaagctgaaaaccccatcaagagactagcagccaggcacagacggtgtcctggactgggctgaaggcagtggaagcggcagaagagagatattctgaacacattttcagtttagaggagagagggagcaatgaacagcaatgaattcagagaatgcttcacggagtagaggttacttgaagctgaccttgaaggacagggacgatttgaaaagatggaagaattaggaaaggcatttcaagacatactaggcttggagcaagggtgggtcggccttactcttgggacaaagagattagtgtgaacagagcaagacaggccaatgcctggaatgtggtgagaaataaggtaaaatatataaaatatgcctggattataaagagctttgaaagccagggaaaaagtgtctagatttcacagcattcactatggtgccttgaaaatcggcactcaataaatattattagactgataataaagataggcattttaggactattggcagtttgcactggatggcaaagtttctcatttagaaggtcagctaaaaggccatataaaaacctggcatgaggtgatgaggaataattcccttgtaggcaattgacagttgactgttttaaatctgctttacagtgttaaccacaagtgccattcaccacttgtgggaacctcgatcttgtgttggcaatcccttgctcaaataaaaattacacggtttaaaacactgtgtactcaaatagccacgtgatcttgattctgaggttataagagttggatggcagttgctatcagttacatgtgcaatttcttcgtctttaaattagttacaggtgcaaaactgcttttaccaaaacaaaaaacaaaaaacaaaaaaaagacaatctggtaaaactttacagaaacttaattccattcaaacgagtctaattcattatcacctatattttcacaaatattcagcactagtagatggatatgaagcatttactggacaacctctagtgcctattttaagcgtccaaagggagctaacaggacagaagctctgtatcacttttgttgatctaagataatgaagaaatttactttgctcagatttcctctgtctcaaggaatatgtacctaacgaaagagctatgaagattttagaaattttcccaggattatcctaacagagttataagtgagaatgctgacaaaaatagtaatatatgacaacctctgtgagaggtatacaattgtttttcatttaataaccaatttttatactgcaattggcagattaaatggatagctgctgtcagggagctttcaagacaagttgtattccttagagatagtaggggaaaataaaattaaaaatgaaaccctgtattttcttgtaaacagctaatgtaaatgatacttctttggggtgtttcctataattcataattttggaggaaagtatgagacaaatgacagttttcagaaaaacagtgattttcagagtttagaaatctacaaaatctgccaagtactggtgatgaaaaaagaggttaatcagagttaagtcagaaaaaaatgataaagctagagccatactcagaaaaaaattaatatggacaagagtaatattcaagaaaaaggtcttgaattctaattacacgtgaaattatggaattcaggggcaggctgcgatggctcacgcctgtaatcccagcactttgggaggtcgaggcgggagaattccttgagcccaggagttcaagaccagcttggacaacatggtgaaatcctgtctctataaaaattacaaaaatttgctgggtgtggtaaggtacgcctgtagtcccagctactagtgaggctgaggtgggaggatcaccgaagcccagggaggttgaggctgtggtgaaatatgatatcaggcctctgcactctagcctgggtgacagagtgaggctctgtctcaaaaaaaaaagaagatctgtgtcaataactcaaatcttttctggacttctacttcagtgtacgaaaaacattataatccaagtttctcaatgcctctgagaagaaaacatgtaattgtcacttttatttaggcccaaagaataacttcaatttcttcacaggaaaatattaatgaaagtgggaaataatttcatcatttaaaaaaattagacacaaagatgctttctctaagtttgatcatcttctcaaaacactcacaggagatcatgcggatgccccgcttcattcatataactgccacttactcttgtgcaataaagagttctgcggtttttgtttttccatatccataaagtgtttaaaatgtaggtttcttttcttttttttttttttttttgagatggagtctcgctctgtcgcccaggctggagtgcagtggcgcaatctcagcctcactgcaacctctgcctcctgggttcacgccattctcctacctcagcctcctgagtagctgggactacaggcgcccaccaccacgcctggctaattttttgtatttttagtagagacagggtttcatcgtgttagccaggatggtcttgacctcttgacctcctgacctcgtgatctgcccgcctcggcctcccaaagttgtgggattacagatgtgagccactgtacccagccttttctttttttaaacggagccttctattctagccacaagtgattaacgctacaaggctaaagcaataaattccatatagggctttagatctacttgcacaagtattgtgtcatttaatcctcccattaatcctgtgtattctgttaatatatgtggaaacagaaggccagagaagaaaaatggcgtgcttaaattcacacagcaaatatgtggccaacaaaggactggtccttatattccctggtactacatgggtccctttaaacttctggaaaggtgaaaactttggtcagttatctaaatgtttctgaatatacagttgcctggagatatgtaaccacagattaagtatccctcaataaaaatggcatgcaatcaatcactcactcctatctcaggagagactcgttttgaaggattgtctattgcagcatttatcatgtctctaaggcatatttccattgctcaatcagctccaaaggacaagtgtgtcatcatctttcaaggctctggtgcaacgacttaaaattgtagaattcacacaggactaagtctggcactaaaagcaggaggcatattcagcttgagcttgtggaagcttcccttcaatcttgccaatttttactagtggaaatggtttcagagccagcatgaggttacttggggttgcttgaggagctcttgataaaaagagaaaggggaataatataaaggggtcacagcaatgatggagccttggaaaaagtatggaagtcctctttgggcatagtggctaagtgtagtcgagatttttaatctcatgaatatgaccaatctacctggatatctgagtcattcacactaaatgtgccactttttcttaaatagcagtacccaaccatttgcaacacccccaatttcactttgcctatgatgaggaagaaggagcacctaagaggactactgtacccatgccaaatacctcaactccacagtgttcaactctgctggcctcggctaatgatgatcatatagctaatttatttttaagtctgtctgttttggaagaggtggagtaattatttaaaggtcatttacaaaatgcaataggagtaacaatcataggtcttgggcctttaggagctcacatttttaacagagaaacagtgcttatgaagaagtagtagccagagaccctataagacaagggttaaattattggtacaaaatataatgttttaattgctaataatttcattctgcactatgttaattaggaagaaaagtactggatcattcttttagaggaaattgagactcaaaaaaattaaactcagagtaaattcaaagcataaaattagagattagcacagaatgaaaactaacttgaatcacataaccatcccttaccacaaacagtacttgcctctcagttaacctatttgttgatatttgttgcactgcattctagacatgttctttcaaaatagacaaaactatcaaattttgactcaagaactatttcacagtatagccaggacattctgccctgaggcaggctaaattaataactgaagaaagatagcaacaatttttatggcttgcagaaaaacagaataacaacaatttatggaataaaacaaaactcctagttaagaggcttagatgatagaaatacatgttgaatcaaattactgtaataaaataaaacagtacttcaggaaacattttcttactcatttttaaaaagctttatattttaaaaacggtgactaatatgttcaaacttcaggcttccaggaaaattaaaaggttaaaatgtaaagccatccatttcagcaattaagtgacttaattttaatgctttagcacttatattataaaacatgaatcacactagctaacaatctatttttacacagaatctgagaagagaaaaataaaatgaatagaaatatagacatcaatacgagacaatacaaaacagaaaaggctgtgctaagaaactccagtagaaggagctatagaaatggagaacttatattttgcaatggccaagaaagaaatattgaaaaggaggtatctgattctgacacatctgaagagaagttaataggtagtcacttgcaataggcatttactgttttagggacctcattttctttatgcataaaatgtgatgcttggaacagatatttttcaaggttccgacaatctattctgcaatgcattaggcactatgctaggaagtatcctaagaaatctaataaagagcaccacttggtcctacactctgggaatttacaattctttgggagagctgaagtgcacacacaatacctagatttcaaaatagaacagaaaagagctgagagtacttcaagaggaataaaagtgctgcaagagggataaaaacagttatgagagatctctaacatatgagatgaaaagaggaaaaagtgacccttcaagtctaaaaagcccttatgtattcttgggaaatctatgcaaactcaggaaataaaaatgaacaggattgtttttggatataactatacctttaatgcttaaaattcaggaaatgggagccatgcacagagataaaatagattaggttaggtttccttttttaaggttctgaacatgtttttaaatgaacgcgatagcaacgagctaagcattaaaatactggagtgtacacatgatagtattaaaacaaacacaacctggaagacaaactacaagagcaattttacccttacataaatgcccccacgtccccaatagccgtatctggaaggaactttaccttgtgatatgtttgcagacagtgtatcagtgaaggaatcgctttctgggtcaataggagaatctcccagagtttcacccataacagcatggaataggggtttgctgtaattcacactgatattttgtctctatctagcaaaagatcaatccgttaaaagaaaaagacttgaagtaacagaatttgtgaatacacccatgagtcaagacatcagtttccaaatatttgggagagatgggaataaacacagaaaggactgggcttgaattggctggcactgtcctattaggagccagctgtgacaaaaagttgtgtcataatgttcactgctttggcaagacttggtacattacagggaaaatattgccacactgtctcgccggtgacccacatgttcagtgtcttgtgaggggcgtgaactgtactgtatttagaattatcagagcagagactgttcaatatccacttgcattttttattgttgtaaaattcacaattgcttcttaaatggaaaacttaaatctcttgcttatgaaataccagaaagcttatttgggcaaagttttctttcggtgtctattcctggttgaatctctaatcacattatttgaagaaaaatttggaattcaaatatgtatccatagtttaaacgttggtatcagcatgctactgaaatgttatattcctaaggtacttactctactgatttgtgaagcccaaaatgatactgactgctatctaaattctgtaaaattaaatagctgagagaatgaagaagggtttgatatggtttcaattttatacatcgggtttgctttcttaaaaacttcagcttatccatcaatagcaactgcagcaatgttacaccagctgatgtttgaacatcaattgatgtttaaacgataagtgctatgtcataatgaaaaaatggagttctctatgagaagaataacacaccaccagaaaaaaatagacttacgctgttaggttggcgaggaattgtggtcagttttgtaatcaggaaaaagctggcttcttgctcaaggcctttgccctttttggcaaggagaaatactagctgtgccaaattaccgatgtgggagcaggtcttgtcacatgagtggcctattagaattgcagtgactttgcggactttcaaagacgcccccacacagggcagtatattagaaggcaataattctctgaattatacttatcgtgatattctgagtaaaataaatatatatctggttaatctccattgagtaactattcattcttcaaggggactagtaaaagtgtccctgtcaatcatggtgcaagagcctgatggggaaatgctggctgggtctgaacatcacggaataaagtgggggagttgagcaactgtgccattaagccccaaaacatctttattaaggcaatccaagttaaagcaaaacttgggtttgctaatttgtccaaatgactacagtgattacagttgtgtaaaattagttttctctatattcagttgaattctcaataaaggagcttctcctttcctccccatgcttggaaatttacttatactacaaagtaatccagacacgatggcacaatacttaaggatatgactgaattgaactcaagtcctataccagtctctgttactctttggcaacacacagatgcagtccttccacctgtcctcatgtcctcaaagggtctcacttctggactcttcatctactgttacttctattctcttttttctcagacactattcaacttctgagtctagtgggtagtgaggccttctaagcctctaatagttcccatactgtgctttagcttctgaaacataagattacatattttaacaatttattattccatagcatcagaatctgataacacctactcctatagcacccaccacattctgacattccgtcttcccccagactatgttttacttgaaagcgaaaacctgtcttactcattacatttcatgcatttgtttgttcaacaaatattcattgccaatataatatgtggcaagcctaaagctaggtgctaggtagacaatgatgaacaagacggatgtgtcaaaaaacagtcaattagcaaaaactacaattttaataaacacagggcctgccacatagcagctcagtaaatgttgcttacacttttggcagcatacacaaaccaagcaacacgcaaagcatccctacattactaacaaaacagttatacaatgtggattatttaatcatattttatgttaatgatagttgcactgcagtgctgggtcacttaagaaataacttgcttacatggacattcaaatgaatgaaaataaagatagatgagccaatctcatttgtatcttattatgtatctgttttgtctttagatactgaaaagacttatttccacatttattcatcccatcattcatcaaatacctactaagcaccaggtactgacctaggcttaggtggtaaataataagccaaggtttctatacttaatgagttcacatgtaactatatcaaaattatccaaatatacttaaaagagtgatcttttcattggcttaaacttgaaggtcaattggcatgcaatgatatgagaaacaatatatttgtttaagtacagtcattactaccagtaaacagtatatgatcatcagagaatttataagacatgcacgtgactatccctatcttcaaagccttaagattcccccagtgtcctgccctttataatactgattggaaggatattacaataagatacataaaacagcatgctggtgatttacatgataagatcttagaactttagatcttgcttagggtgctttgtacaccaatgggttgtcagcactttgcacgtcaatgcagcagtctattgctattcatcctatggatggtccccttgcaggatagtccttggtaatgttacagagtgaggaggagtggtaaaagaccactttccttatgcactatgtactccttctgttgagggatgtaaggttctgtgcaatgtagaggttgagaagagggccatctctcctaggactttggagacagaagggtatggatgtgactttgagtacaccaccacatcctcagcaggagaaagaatggggataatgaggaatgattctataatgaggaggatgaaaacttaactctaccccagttcatgatatttgaaaaaattgaccgcttggtattagagaaagctactcttcaacatttagtcttcaatattacttcacagaacctgtctttggctacaagaatctgaatattactcagccataaaaactcttcacactttggtacttttaggagaaggcaattcaaccaataaaagctgtgaatgattcaataacaaaaagtaagaaaaggtctaaaaatctatagttaataaaatcatggtattgaacctatataaagttatttttagcattacttggtgttgggatgacttacataaaatattcccataatatagaatattaaatactttggagcctgcattattcttgaaagctaatgaaaacttcactctttttttgctataaatttggaatttattctctagaatgaatatgaatttttaaaattgcttaaatagctttttcttttgtgtgaaataagctatgttagtattggtataaaattgtatgtacagtatttttttcttttgctataacctcatttaaaaatctgcttcatttaatgctgtaagtgctactaacatttatgctagcttctaaaaggttaagcatttagatctcattgcatccctagaacctagcagagtccctggttggcattaaaacacacatattgtttttgttgatgatgagagtaatgaaagaacagcacatccatatcacatgtatcattcaagaaggagtttagagacctaacgaactgataatagcatccattttcttcttgtttcaataagatgtaaatttctggatgatgctcccacggaagccagataattgctaacaaccagaatgaccagccaagctcacttctccccctacccaaaagaatggctgccttttcctagtgcaattcagattggcttggaactttattttcaagtggtggttgcatcagttcagggtttcttcatagtcccaggggagagacaacatgagagaaatgctgggccaatgggacactcctttgagaagaacaaataatcctgtatcctggatgtaaatttcaccacaaccatcacaacaagccggatagtcccataaaagcagacaaaggaaggtcaatgttcaatgtatctgtgccccttttggaaaattttttaaattaaaaaaatttttgaccggggtcttgctatgttgcccaggctagtctccaactcctgggctcaagtgacccccctgcctcagcctccagagcagctaggatttcagttgctcgccaccacactcagctgtgtctttttttttttgagacagggtctcactctgtccctcaggctggagtgcagtggcacaatctaggctcattgcaacctacctccacctcccagattcaagaaattctcctgcctcagtctctcgtgtatcatttttttgaaaggcaaatccattcttctttaaccaaaaactgtaattttgttcagattttcaaaagtaatatattttatggacataattatattaaacaattatattattttgatttaaaggaaaataatgctgctaggtgcaatggctcacacctgcaatcccagcactttgggtggctaaggcaagaggatcccttgagcccaggagttggagaccagcctgggcaacagagtgagaccctgcctctataaaaaaataaaataattggccaggcatggtggcatgtacctgtagtgtcagctacttgagaggctgaggcaggagggatgcttgagcccaggagaccgaggctgcagtgagctgtaatcgcatcactgcactctagcctgggtgacagagtgagaccctgtcttaaaaaaaaagaagccaataactccagtaaatgtatctttggtatcaaaaaaaaaaaggtcttcttaactcagaagcagtagaaaagaacactgacattggagccagaaagcctaggttttacgtttttgtcttggctcagccacaaacctactgtgtcaactctttgggtccacatttctcatctctagaatcagaaaaagccctttccacaaaacagaataatccttaaggtctttttgagttttaatgttgagatactgaataatatgactgtaattcatttatttaaaatttaatggaaattctccatattgcatacttattcatgttctgatcctgagttactatttccttttcatacttgactcatacctaggtgacagtataaaaggcactttcatctgaaaaaatagtgtctgatgataaattaaaagtctcaaaaggaaaaaaccaactgaaaacttccttttctgcccagcttcaaaagttaacttccctctaatacctgaaaaagagactaacctgtttaaccactttctagggatcaactaaacacttttgaaattactgtaactttgaaccaaagacgtcccacctaaactatgttaacttgtcgttgcatgtaatatctgaaattctctagtaagctgttttctagcatagtaaaataccatgaactatattatcaactgacacattttcatgttgtgggaaacctaaacctctaaaacatgtatctttttcagttttcagattttatcaatgaatttttcaagatcagttatatggagatttattgggtagcacatcctgtcactggtgaagcacagtgggaattcacaaaggttctacagcaagcgtagagccgcggagctgcactcagtttcagctggtgtcacttaccagttctgtgactgtactaaaggaaatttacgtactgttgaaatcacgggctcacgaaacttaataggagggagattagcatattccaactcttaatttttgatataaggaaaatgggttccagaggaatgaaatgatttgcccaaagcatgacctagataaattagcagcagagtttgagctagaaaccaggtttcttgattcccagtccaaagctccaaacgatgctctatctcattaaaatgatgcagtaagacgttcaaatcagttcttcaggtcaatgatccttaatgccaacagtcatggtggaagtcatcagcatgaaagcatttttctatgatgaatcacttaatgtggaggaattacctatgaaaatgtcatcattcaccacagggtttagatatggtgctctctacaaagtaagtactcaattatgactcggtaattaaaatttgataatatttgaacatcagttcacggagtcattttgctgacgaatgttctcttgcctcattcacagattcttcatgagtcatcccagcattctggggttcttctggtatgatgtttttgtttctattgacaaagttccttgctcttaagaaaatgataacattactatttgaaaatttctactttgaggtaacaatactctaaaaaaaaacaccttggatctgtatagtgtttttatttcgtttgaaactcacaacaatgctgggaggttattcaaagcaaaagaagaaaataataacaactattgaatagggtttcaatgtggaaccagataatagtttttggcagtaaagctttgagtaatttgtctttattcaaaatgaacaaagagtcaaacagacctgggtttgcattcaagccttgtcacatctctgttttcttatcttttcggagttgtgagaattagagatgatttaaataaatcagcgtctggaacagagtaggctttcaaaattatattatgaattcttataatcaaatatttaaatcttacatgacactttaataaagcaataagagcagtcatcaagcaacactcttatcgctcttatgttaacaggagctacataaatacgcttcaggaagagacggtatatagagtatggaatcttcaaaagcaagtacaaatttttaaagttcacttagcggaagtagacatattttcttcacaccaacaaatagatatttgactgaaaataaaatgtaactgtgaaatcagtacataataaacttaattttgatggcaattaaaccacaggcaacacagagtatattttatgtttattttccggtaagattcatcagtccattaatagtagatggttcagtctaaaagtttgtctctaacaatctttattagacacattataaattctttcccaatctagaactttacatttgaacttatagaatatatcttaaagcagcattagtaaaagtaagaagacttgaaaatataaactagctttaagtaagattcagattccacatttattgagtgcctacgctgtcaggggctgtgctaagtcttttaaaataaaaatttgtctagactttataaaaattctgtgagattggctgggcgtggtggctcacacctgtaatcccaggactttgggaagccgaggtgggtggatcacctgaggtcaggagtttgagaccagcctggccaacatggcgaaaccctgtctctaccaaaaatacaaaaatgagctgggtgtgatggcacatgcttgtattcccaggtactcaggaggctgaggcacgataagtacttgaacttgggaggcagaggttgtagtgagccgagtttgccccactgcactccagcctgggtgatagagcaagattctgtctcaaaaaaaaaaaaaaaaattcggtgagattgaatggtagccccatttcacaaaaaggaaacaagctcagaaagaatgagggtgatgttatgattagataatgggctgctaaataccgagcaatacagttaagtatcacataactagggatagaataatataaataagactgagcatcaattctcaagccattttcctacttttagtaaagaggataagacaagcacaatgcactctaatatacgagtaggtggtttgagagaagtgcaaacaatcatgaccattactagagtaatttctgttgagctatgtattctgcctctactgcagtactcgccactgacttgaggccctcaaccctgcgaagtcatttattatcaccattttacagataaagaaattgagttttgagatcacatagctaataagaggcagagaagggatttaaaccagatgcaatggagtgcgaaagatattcagagatgaacagagcccttctgactgtgcatggagatggaaggaatccaaaaagccttcaggaaagagaggaaatctgagatgagcctgaaagacagagaagctttggatggcaggaacaaggaaagggaacagagtgaagaaaggcaagactcaaccaagagagaagagtgagaatgaacttggggaatgagaatccatggtattgggcacctgtgggacgttttgggatagaaatttccaagggctactaggcagtgatttagatcaacacaggggagccaaaaacaacaaacgtgtcttagacctactgtttcaggctggcagagttctgtgtgcacatcattaaataatactgtacgtgtgtaggataggataaaagaaatctctttagtaaagatactgaatttcaaatgaagtacaatacagtttacatatgttaaatctttgtatttgaaagcttggtggtttttaaagatactagagtgttttctagtctttatatcttctttcctccaaggaaacattttcattttccttgaaggaaagaatacactgctgcttttctatctgaaaaggtaggggtttttttgtttaaaaaaaaaaaaccacctttcattattatagaaccaatccgcgttcattgttaaaaattagaaaatacagactggtaaaaacaaaatgattatacttccactaccagatataaccaatgttgaactcttaaagtttatgcatctgggtctttttctgggcatatgtatgatcatatgtatatacagatacataagcacatacacatatacacatacatacagcatgtgtattttttaatcaaaatgagatatggtacttcctggtagtcctctgctttttcaagtcaataatctccatcttttcatttaattacattttcatttcaaacaatacccagcccatagtcacatttccccagctgaccccaaatgttctttatagttggtttgctccaaccctaatctaatccagtatgatgaaatgcatttggctgtatgttcctaagctgttttaaatctagcatgactactccttccccttaattttaaggccactgactaattgaagaggtcaggccagttatcagatagaatgtctcaacctctgaatttgtctggttgttttcttgttgtatcatttagcttgattctccatcccctgtgtttcttataaactggacactatatccaaggatttctggattcaagttaaacattttaggcttgaatataccataggggatgtgtacttcctattccatcacatcagaaggcaaaatatatgactgaccatcagccatggtaaaatctaccactaagttagaatggtgatatgtctcatctctccattgtacagttactttttctccttcaattagacagtcatcagtgcaatgttactttggtattacaaggatgttcagtttcattaatcattcacctaaaggtgtaacaaactttatcatcttttcctgaatcaatacttggagtttatgaaatgtttttctaattccaccactctttccacatttattagtaggaaattttttttctttttttgagacagggtcttgctctgttacccaggctggagtgcagcagcgcgatcatagctcaccgcaacctctgactcccaggctcaagcgatcctcctacctcagcctcctgagtagctgagaccacaggcgcgtgccacaatgcccaactaacttttgtatgtttttgtagagatggggtttcaccatgttgccaaggctggtgttgaatttctgggatcaagtgatctgtccaccttggcctcccaaagttctgggattacaggcatgagccactgtacccagacagcaggcatttttctataaggaagatctttccttcagcaactaaagccatgtaattaccctgaaatacagttcctacaagaaaggaagactgcttgtttaatttgttctcttttattaaaaaggtaaatatcttcaacaccaaacattcctaggcacatctctttcctctgttcattgaatgttcacatcataaaacacttacatatctaagtttttctttttcagctatttttagagaattttatttcaaattcatctttctccattttccttggccctatggacagttaacgggacacccatcccatggttcttcaaatatctaatcttttttttttttttgagacggagtctcgctctgttgcccaggctggagtgcagtggcgtgatctcagctcactgcaacctccacctcccaggttcaagcgattcttctgcctcagcctcccaagtagctgggactacaggcatgtgccaccatgcctggctaatttttgcatttttagtagacactaggtttcaccatattggccagactggtcttgaactcctgaccttgtgatccgcccgccttggcctcccaaagtgctgggattataggtgtgagccaccacgcccagccatctaatcctttttattgcatatacaaaaccacttaccaacccctaataatataacttatgctttggttttacccgatgatttccaccaacagattttcagtgtttagcaggtagttattcctaaattacagggcatagttagaatacaaacttaactggttcttccaaagttatgttgtatgtctgcatagctttaggaaaagagtccaagattcctgacaggtttgtggactaataaaccacattccaaccatctagtttattctttatactcctggagtgcttttcttcagatacctctaggaagtaagatgttacatttttatttttaaaaacacggcctctattttaataaactttttatttgaaactttggaaacattttattgaaacacagagggaaggaggggatgatgaaaacttggacaagaagtaacttttaccactctaaagtaagcacctctcccccgcaataaaaataaaaataaaattcagacttaattcagtcctcctcctaattatatttttgttatctattgcacacagtcagatgaatagctcaaaatgcctacagcaactctgggcaagttgacaaatatcctacacattgaaatgagaagacggaaggaggcagattgcttaattgttacttgggaattcagggaggtggacaagccaaaatctgtacagggatccaaagagcacaactccttccttaggcagcaggagaaaacaatgggccaggttctcattctgtgtaatctcataggatggttccattgtatagcccattgtttcttccatgtactgcctgaaggggaagtatattgttatctatgggagagcttccataagagagttacataggatgagaaggtagcctctgggagattaatgagtgatggggagccagtcttgtacggaactttcagatcaacactttgagaactgtgtacctgaaagacctatgcagtaaggtcaggaagcttgcgtgagcaagaattagtcagacaagcaatatgccacatatgccatgctgaataaaggggctttgttagagtatttgagggagggggaatcattaggaggtagagattcacagataacagaaatgtgaggatgcgactctcatgtgtgcaagaaatcctggagaacatttaaactaacaccctctttacagatggggaaaccaaagcaaaaagaggttaagtgacttgcccaggccttgcccaagtacagtcagtgacaaagtcaaagctagaatccacgatactgtagttactggatccattctttggttccactaaaagtattttttcagctgtgtcttctgaccttggaagggtcaagggcgaaaatatctgatacctaaatattcttaggagatctagaagtcttcataaaaagcttttaaaacagcgttattgatgcatattttacatagcataaagttcaccattttgaatgtgcaattcaacgaattttagtaaatttaccaagctttgcaaccatcaccataaatcagttttagaacattttcatcacctagtaagatctgtcatgctgatttacaatcaaacgccaattactacccccaatcccagacaactgttaatctattatacttttctgcctctatagatttgcttcttttattagacatttcagataaatggaatcatatgatatatggtctcatgtgtttggttttttttcacttagcataatgttttggaggttccgaggttgagtctggaggttcaggttgtggcatgtgtcagcagttcatgcctgtttactgctgaactgcctagattaggctgtgtattgatacagcacattttgtctatccattcagctgatggacatttagattgtttccgatttctgaggaaaagtttttaactctgttttcaattttaccttaattttaatgacataaaatgtataagaattcatattttagattatatgtatgattttataactgaatacagacaagcagtttcagtgccacagtttctacctgtgatttcactggtgcccaatatcacaactttagttgtctaaggttagtgaaagaagaacaaaggtaaacttttaatatgtaaatgattcatctgagttaactgaagttcaaactagatccagtaatactgtagaaaggaatgtttcacagaagagttgaaaaagaaaaaagtcttggaaaaatttaatcagatatggcattaagcagcaaaaggtgttgaatccccaaaagtatatgctatagcagtaatttccatatttgtacctttaatgttaagggctttacaacttattttaaaatttattttggttgtgtaaatatataagagctataaacatagtttacaacttgttttacacatatttaagttacatttaatacaaattatgtgaacactgagaatcataagaaattttttccttgaagtctgtgctgtactcaagcaattttaagagagagatatctatatagtaataaaataactgaaacaatttaaattctgtcataatataaataaagacaaaagaggagacataatttgtgcaaaaatcacacagccaattagtgacagctaggtctaaaacacagctcatcagtgtcatggttacaaaacatttattacaagttgtatgttgttaatctcattgagcctttcatcattttataaacaagacttttattaaaattgagacacgaaacagattcattttctaagtcatactttcctacctatgcctgaataatgattgccttccaaacctttagtttaggatctaagatctggtattcacagagttggcatggggaagtgaaatgttttagctaactttaagactgaagaggcagaaggatatatttatttgtccttccttattcatgaaggattggttccaggacgttgtggatacaaaaatccaagatgctcaagtccctaatctaaaatagcatagtatttgaacataacctatgcacattctcccatatactttaaatcatctctagattatgtataataactaatacaatgtaatgctatgtaaatagttgtttataccgtattttacattttctatttttaattattgtattgctatttttatttatttttaaaaaatacttttgatccatagttggttgaatccatggatgtggaacccatgaatgggggcaggggtgggagcaactgcaaatggtaaaaacagaagagccaggctcgactttcagctccgccactaactcggtttatgaattcaggcaagtcgcaacagctctgctcttaagtccccatttttcaagtggagatagggaaaggagagtagattagatggcttctaagattttctttgagctcttcgtttcatgaattttaagtgttaaaaggaatcttccattataaactcttgctctattcagaatcagcctaacctttgcataggttaacaatattattgctatactctgcccacacacccacctgtcctcccacttttttgttccctatttcctaacacataagttctactcagaacaatgtacctactcactcctatgtgcctatagtatacagtaagtcctcaagaaatactgaatagatgcattagtgtagaaatgaatgtatatattcttattttctgccatccactaagacttgtttctggcttcctgatctttcttatgctgtaacacaatgagatatttctattggttggcacaaattaaatgctctttgaatgccaattcatcctagtaactcatagagtcaataccacataatttagacctgatctgtttcacgtatatttgttttatttccccaagtatattattaagtcatttgaagacatgaaaagagtatgccttctagttcatttataattcttagcgcagcattaggtgttcaagacttgattgattgattgctaaactccaaacagacaagctactgtatttttaaaggccttcaggagagtaccctattcaaacttaaatgtccacaagaagctcagcccccttgctttactttgagaagaggttgtaagaaagatggttatcactctttgcataatgtctttataaaaacctaaaggcctttgttcaaatattcttcttccttaccttcttttcccagctaaataatcagttgctcataactagttcctgagacctgattcagttttcagtactttaaacaaaataaaggcacttaactattattaaaaaataatagctatcaaatctggaggactctaaaggagaatctatccacagcaaaccttctagagtagataaaattaatttcagagtagattattaaggtaatcagcagggatgttcagctaatctttttcaaagaagaacaaagttatcaagaataatgtaaatgtttccatttttctaaagaactattatcttccatctttttttttctctgaagtgtttctagtagatgtcagcatcactagtcctcaaagagtatcaagaggtgaaaactcacaacatggaaaacctcagacaggaagcttaacgttagtgttgcataaaagataccacaaactcctgacctggttatcctcctccccacaactccccaagagcaaccagcattaatctgatgtatcttgtgatgtttagaatgtgttcgcaaaccaattctcatcttattacggagaattcagatcagcagcattttggttccagcactgtctcaactggagtatcattttccctttgatacattctcataactcccacttcttacccttcctaattaatgtctctgagataaagagattaaattaagatgggcatatacctccttacccaaactgggacacttttaagagtgaaagagggcactatcaaaaaatcacactaggacaacaggcataaaccaggactgtcaggcaaaccaggacataccatcactttaagattaagcaaggtaaggagatttagaaaggacagtggtgtcacgacgtctttggtcctggcaactagaaactaggtcagtgctgccattcttgttttttttttttttccccacattgccttctacttctaatgattagctcattgatgtaggaatcatattaatacttttattggaaatctgtaattagaacgtggtggggtgaattttctttgctttgcttttcttcttctttttccactgaaggttcacacagggcagctgttttgtagagggtgagaattgcaaagtttttgccgtaggctctcttgcattaagaattgttgcatctggccacttttcaagcaaccagatgtgaaataagtaatgcccgtttcaattacaaatctcattttaatatctttcaacataaacaacaatagtcaatttgtgtatttcaaggcttccaagaggtgacagacattcaccacacaggaaccacactctaaaaatgctagagaaaataagtatcctattaaaaatatttttaaatggtcaaaactgcttatttcaatgaaggcagtaaaataaagcttgatttgatgactacaagtaacacagtaacaaaacctcaaataattcaatttagtaaattctgaacactttggaagtcttaaccataagccttagctattgaaatgattatattctggaattactaccaactctgacaaggtctgtaaacaccacctaaggcaacacatgctttgatggtaccagtgctcacatattatttgcagagtattcagagctctaatacagactaaaaatcatctcaatagtgaattcctaacaacgtaccatttctacccatctgaaactgcaagtaaatgcattaaactaccttacaagaaaattaacagtaatttctattactcccaattttgcaatctggatccattatgatgggccttgtgactcatcacaggaggccagtctgaagacagttcatgctacttaaatccgtagtcgtaagtaaaagttaagtatgggaataaacaaaataaagaataaaaaattagaaataaacttacagcaaataaagatgttaaaatgtattgacctagatggtaggataacagagataaaagtatataatgtgaacagctgaagtacatgttggtacataaagtgtctactggaacaatgcaggacaggggggctttgactaaaaagtataaaataatcagtaatatttgtatagtcttttagagttcacagagcacttttgcatatattatatatttcatcttgagaagtaggaattattcccattttgttgaaaactgaggaggttcacagaagctatgtaacttggcccaaatcattcaaccagggagtaaactctaaacttaaaaatttaacccaagtcagccaggcacggtggcttccacacctgtaatcccaacactttgggaggccgaggagggtggaccacttgaggtcaggagttcgagaccagcctggacaacatggcgaaaacccatctctactaaaaatataaaaattggttgggcatggtggtgggcacctgtaatcctggctacttgggagactgaggcacgagaattgtttgaacccgggaggcagaggttgcagtgagccaaaatcgtaccactgcactccagccagggtcacagagcaagactctgtctcaaagaaaaaaaaaaagaaaaaaagaaaagaaaataaaatttaagccaagtcaacaaacttttttttagtaaatcaggtcaaaaaactttgctatttaagagacactgtgggaaatattatacaaagaagtataagcctgctcttaaggaacttgtaatcttctgggagaaagaagctgcaaagaggtgaaaagttaagtaatgatacatgatttgaattaagaattgcatccaataatagaagaactgtcacaaagcagcacctagttaactgccagataaatgtaaaaaagccaaagtttcacagggactcaaaaaaactcgtcaaaatgggatggctggggacaatggcttcacagaagatgggggcctgtatgtggatcctaagagtacggccttttgaaagacagcaaccatgcagctaggttatttcctatctgcgtcactcaacagaacctcagtcactaatgtcgtatgaacaaagtctgttgtctgactaactgacgaaatgactgacgactgaatgaacgagcacacagaaaggaagtgtggagccttctagacgaggtagggggcataagcatgatgggggagagtgaatgtgaacctattactgtgctttaccatagctcagaacgtggcttagccaaggttccatagcgagatggcacagctgaggatcactcgagcccggtaggttgaggttgcagtgagccacgatggcaccactgcactccagcctgagcaacagagtgagactctgtctcaaaacgacaacaacaaaaacacaggaatataggtctcctgactcccagagagatacagagatggaaagagaaagaatgatggctataaaattagatatactcaagctggaagccctacattaccacatgccagtggtgtaactttgggcaaagctatttaacctccttctgtttcctcagttgtaaatgaggattgtggtgatgaatataagaaataatattaaagagaataatgtaaagcacttagaagtgcttggcatacagtaagttgaaatactagcttccttctccctgaactacatttaaaagggtgtttttgtttgtttgtttgtttgtttttacaaggcccactttggtattgctaccactagaaagatcacctatgcagttggctcatgacttcatttactcaaacctaatttagatgtaacttttcagaatttttatttttagagacaggatctcactctgttgcctaggttggagtgcagtggtgtgaacatggctcactggagcctggacctcccgggctcaagcgatcctccctcagcctcccaagtagctgggactacaagtatgcatcccaccatgcccagccaatttttaaaattttttgtagagatggggtctcactatgtttcccaggctagtcttgaactcctgggctcaaacgatcctcccaccttggtctcccaaagtgctgggactataggcctgagtcactgctcctggcctttggatggttctttactgtatacatgtctacttgcaatggtagtagaataattttgaaatcactgccctatatatggagtcagtgatcagtaatcaaagacaatctatttggatgacattaataatgctgaggaatgtactgatatacctaggcctctgggtggcattacataaaaatccacatattaaacaaaaacaaatgccatataactgtgattaactattaaaaacccttaacacactgaaagttgttcttctacctttagaacaaatgggcaaatgctaagggagaaaaggcagtttaaaagttatttatttttaaaagcagcttccagagcacttcctgggataatcttcaacattttttatatctacagtataatgttatttgctactcaaaaataaaactaagattctaaaagttcttgaatcatcaattcagggctatctaaattcaatttaaattttatttcaccctatcatatttaccaagacagaaaaatggcttaatatgttgaagaaagattttacacaggcagaaataaaaagggctttttggttgattaggttaagcagaaatttaaatttagttttgccaagaacaatgtatacactgtacattccagttcctcatcatttcacatgactagattctgggaaaggaattggaaaaaatgcttaatttgacaaccattagtatataactatctccacacatatagtttcaagcactatggatatattaagaccaaatttatatctctgcctcagtcctctagtctgaaccttgacactacatagaaatatctatttggtaactccattgaaatatctcacaggcaactgaaactcaacaggttaaaaactccattcatcctctattccctaaaactggtcctccttcaatgagccctgtcttagtaaatgctgccaccaatctcccagctgatcattgccaaaaacagggagtcataattgaaggcccagacatccccatcaaaccaatcgccatgtccttttaattctacttattaaacatttacattcagccacatgcttcagtctcttccacttaccaactggaatccaaagacactctcttcttccatatgcacctttccatagcttcccacctggcgtcctgtctgccatccttgcctctccaatcaattctgcatactacagccagcatgatgcaaatcaggttatgtcactcccctgtttaaactctattttgacttttgattgtcttaaaccctgaataacctagttcttgcttctctctgaagcctcactggattccttttctccatttaaatcagggagtaaactaagctgtttcccacatcacagccttcacatctcatttcctccatctgtaacatggttcttctcacaacccccttaaggtaactccaattcactcttcaactatcggcataaaaaccacctcctcaaactctcacagtaacttaactcatcctatgcaactgctctcattctacacaactcatactgccatttctctcccttacagcactcatcattttagttaatacttgttctttttctgctttccccactacctgtagacttaatgaagacagaatcattgcaagatctccacactagtaacaaagaacactgagaaaagcttccaaagatgagttttagtgttggttttaacttgctgtgttatcttaggcaagtcacttccatcttactaatgtaagaaaacagtctcattccaggaaaatgtccttgtattgtgaaatgtgggctttctaatgaccttttagattattgatataaaaacagattattttaaaattctaaaactctcagagcccaagaatatatttgtggatctccaagaatctgtggatctcagtttggaaaagagatggtctcttcaaggtgtaaaatttctcatcattctgagaaaatggattttattttctggaatacttcacagtgaatcacaccctaaatgtgagcttgttaaatgagatttgggagagagtacaaggaattccacagcatcaacgcatccagaacaattctttcagttgaagagagacagattctcaagtgattttagcaacagcacaaaaagcatttgaccttaattcaatgtatatggcaatggaaggctgacagcatttatctgtgttcaaatgaaatcatctttttgactttgtggagaaatatgggagaaaatcaatttaaaagtgagagaagaatagaaaggcaaaaggcaaacaacccaatttaaaaatggacaaaagtcttgaatacacatttctccaaagaacccatacaaatgaccaataagcacatgaaaagatgcttaacatcagcagccattaggaaaatgcaaatcaaaaccacaatgagataacacttgacacctaataggacagctttttttttttttttttttttaaaaaaaggtgttgtagcaatgtagagatattagaacccatatatattgcagtgggaatgcagaatggtatagcagctgtgaaaagcagtttggcagttgcttaaaaagcaaaacagaattaccatgtgacccagcatttcactcctgggtatatacccaaaagaactaaaagtggggactaaaacagatacttgaacaccaatgtttactgaagcattatctgcaatagcaaaaggcaaaaacaacccaagtatccatcagtagatgaatggagaaacacaatgtggtatatatccatgcaagggaatattactcagccataaaaaggaatggcattctgatacatgctacaacatggatgcaccttgaagacactgtgctaaatgaaataagccatacaaaaaggacaaatattatatgagtccacttatatgaaacaactggaatatccgaattcatagagacagaaagtagaacagagataaccagggctggggagtgggtgatgtggagttgttgtttagtgggtatagagctgtttgggtgatgaaaaagctttggaaatagatagggatgacagttgtacaacattgtgaacgtaaccaatgccactgtaccaatgtacacttaagatggttaaaatcgtaaattttatcttaaatatattttaccacaataaaaaaaaatgatagaatgggcaacttgttttttactggttcgacatctaaaactgctaaacttttaacgaactaatagagatataaaatacacaacatggttttcataggaaaatttgttctacaatcaagaattagcagtaataagtgtacaactaatcatctagtctacctgcttttttagaattatagcggtcccaaaactggtttatacttatcatgccatacaaaccttaattctacagctcatgttaattattaatcctccttagtcatgaatgttaaaagtctcaaagataattgatcaacagttgaactacaaatcaaaatattctgatttcctattatcctttttatccccctctagtggaggtgacaatgagtgattgacatcagaatcaaggagagaaaagtgagagcactattacactatgcagtaggtttttttttttttttttgcattttgagtatttattgtccttgtttttaacataatttgcaaatttacataattataatggctgtgtttaacaactggcttgcaacaaaattcttgaaaattgaataattggcccacctgggctgggatgagccagctggagcacaccattgccccctcagcctctaggaggcctcaggattacggcgtccatcttatgatattggccaaaaggagacagtcttggaggtgctgctgactgttgaacttccttttggaatgtatgggagaaggcagggaaaggaatctttaggcagactgccatccagggactgctattctgttcactgagattcagctgtgaacgtctgttctttcttcctcttctgtctgctacatgtaggcctgaaagctgaggcgttagtcaaagatacaggaagggaaaagagaagagggcaagagcccatcccccaagaaaggaagggctctgatgcagagggagcaggagctgaggtggagatggccactgcctctctcaccctctgctcaagaaaagcaggcttagcagagtgggacagatgctttttattggtctggctggtgtgcctagtggaaagctcaggcagagcttcctatcttgccctggctcccatctttcctctcctgggagttcatcacacaccccaagagggaagagtgtcctgggcagaggtggcaggcaaagccagggtaaaaactccagggctgggaagcaaatggggctcagggtgatgcagaaaatgtgacgttgccaggccatccaaataaagcatccatcagggcagaggagaagctgtttccctgcagagactcctctgcccccaccaggaatgagaggggcaggaggaagagcttcccagagaggctccctactgggcccttcgtgccatcagcatctcccggatgttgttctcagcttccttaacgctccgctccaggtaggactttttctgttctagttctttaattttttcttcgctatttgctgcttctctaacagttgattgtgaattgcttccttggactgaaaaataaacattcttcctacaccttcatacatgttagtctcatctaccaaagtcatgatctctgtatctgtaagatgtgcatgctttttcgttctgtttagctgttcaatcactatacagtaggttctaagaacagaatttaatactatttattcccattttacctttccatacacacattttgtaaagaaaacagagcttttaaagtgctatgtagatactaaagaagcattctcatttgttcagtttgcttgctttgtttgtgataacaaaggacactcataaatttcaacttgatgagtgatgctgaaagaagcaagtgccatccttggctgaaaaatcctgggattttaacaccttttttgtgatctgaatatattttctgaagaactttcctgaatctaagtcaactgtcctacagaacaattgtcattcttattccttgctcctggaggaggggttctccatctcttcagactgtgggtctgaagcctttctcaacagtgccaaaaaagcatctgcgccagctgcctcggtagttctctgctgtggtcttcattatcttttggtttgggcttctcattctcttcaaaaaacctgccaactagactatgtctctagtttttctcagggtgcttggaatcaaactgctgagtggaaaaaggcgactactcataataaagattctgttctttaggcttctctttactggacttcttaccaaatgcccggaggccatgagctcaaattatctaaatataaagaaaatgcttgttggcaacctcatttgccaaagttccacttagactgctaatttatagatggtttgaaaactctacgtccagaagattggaaccggagtggtgacgctgcctgcggtgaggcaaacagaacagctaaaataaaaccagcagcagaacaaaggggaagaagcaaaccgggtacaaacatccagtctccttctcttttaccacctgactcttcactctacctctggtattttaaattacaagataatctctttcaaggtaactcccaaatatatcacagtaaattagtcattcttttaaaatatactgtgataatgcagattttgaaaaaaaatagttaaaattgaacaaacctttaaaggaggaaaaaaaagtaatcaaaatcttatttcaagttcacattctcataggatggctatctcactatcttgaatcaaaacccaggatatctgtacagcctccactgaacactcaatgtttgaatacttggttgtcgtctatggccgtaccaccctgaacacgcccgatcttgtctgaatacttggttggtcttgatcagtattagtttctacccaagaatcaaacagtcatttgttaaaatctcctttttttttttatatatctcacataaacaaatactctaaatctctacctagggaaaggaaagatcaaggataatctatgaacttgaagcttagtactgaaaaagagacaaagacatctttaaaagtctactactagtgcaatgtacaactttggccctatttcttaatcagaaagatgaaaacaatgagtgacttccaaaacagcgctatgtaaaactgttaatattctggaaagtagcataaaatatataaaaacatgtatttggacaaatgttcttgcagtcaattttctcatttgagaacattaaccagagatgtatctgttgattttattacagctgtaacttttccactgtatgaagtattaaagttaaaagttggcttgctgtttcagtggtctggaaaacgcatattgtgtatcactggactgctgtaaatttaaatccatttcctccatttctcagctcatcttggcagaataattctaactataagtgcaataaactatattgtcatacttcagggtttttacaactcgatctaccatatttgggggtagggggtggagtagcaagaactcataaggaagtaaaaggtattatggtgacattttgtaacctttagctagccagaagacaagtgaaatcatgtgtttaagataggaagcattactaaatttgggatgacttcttgtggttttctttttcttacatcagcatcactaaatttgttcagaaatagatttctgtttttctaaatcatttttcctctacaatataaaacataatttctttttataaagaaaatattattggtaacatttaaactaatgaacgaccgaaaactggaatactaatttttaagtaactacaaaacttatttttgaaaatcctatgatttccactgtcagtcaattcacaagtttagttcccttttcataaaatgtcaacatagcaaccaaatgaaaaaccaatttaagtgatataaaaatagacaatacagacaagtgactgccttttgcacaattaatgtgtccctgaattgtcatggaagagattgagaaaaaaaaaaaaaatcaaagtggagaaaaaagactgggaagagttctatactaagcctttatttatttatttatttttttttgagacagagtcttgctctgtcccccaggctggagtgcagtggtgcaatctcggctcactgcaacctccacctcctgggttcaagcgattctcctgcctcagcctcccgagtatctgggactacaggtgcacaccacgacactggctcgttttttatacttttatttatttatttatttagagacaaagtctcgctcttgtcgcccaggctagagtgcaacggcgtgatcttggctcactgcaacctccgcctcttgggttgaagtgattctcctgcctcagcctcccaagtagctaggattataggtgcctgccaccacacctggctaatttttgtatctttagtagagacggggttttaccatgttggccaggctggtcttgaactcctgacctcaggcgatctgcccacctcagcctcccagtgttgggattacaggtgtgagccactgcgcccagacaatgttttgtatttttagtagagacggggtctcaccatattggccaggctggtcttgacctcctgagctcaagtgatccgcccgcctcagcctcccaaagtgctggaattacaggcttgagccaccacgctcgctcacaaagcctctttattggtggcatttaattttgcaattcaaactttcattcatttcataaatattcattggtagttgttctgtgttaggcactgtccttgatgctgaggacacagtagagagcaggatatcatccttgctttcaagggaatttacaactagtctaatcagacatcttaacaatttttaataagaggaaaaaggaattcatccagaaattctgacttgtggacttaagttctaaaagtttctttgtacctatgaagatattaactctaattttagttatctcaacatgttcgttttataaataaagctatatggttgacgtatctgtgaaaagatcaaggctgctccattccagaatgcttagaaagttaagcacagtattatagaatggtcctaaaagatcagtttgtctcacctaatttaacctgtctaacatatgggaaaactgaggcctgaagagggaaagtgacttgatttgggtcacttaactgccatgtagtctttgttttttgagatttcttccaggtaaaatatgactttcaaagtatagttgtaactagtgcttttatacatctattcttgcctgacacctttctcttatccccccggcacagcaggcacatcaacctcattatcctttcttctaaacttggtgggaacagtcttttttctcacatcgtctgtgtctttttaatgtctattcttttttttttcttttgagacagagtcttgctctgttgcccagcctggagtgcagtggcacgatctcggttcactacaacctccacctcctgggttcaagagattttcctgcctcagcctcccaagtaacggggattacaggtgagtgccaacacacgtggctaatttttgtatttttagtggaaacgggatttcaccatgttggccaggctgctcttgaactcctgacttcaggtgattcacacgctttagcctctcaaagtgctgggattacttaatgtttattctgagacctctccaacactattcccaccttctccactgatgagcactcttctctgctgtacttgactcagctgcctcagaagagaactgtcctactcgctgcccaaattagcaatggtctagggtcacttcctccattaatttactattaccttctaaatgctgaaatattcctaccactacgcttttataatcttaaacaatgatcttctccttgaacattctaatggccttactctttttttttttattcttcttgacctttcattaccattttgcagcatttcaattaaaaaaatatgtgggcttgggggttagacagacagatctcagtttaaatccagattaaccttgcaccagcagcacgacattcaggcaagttatttaaccacaataaacttcacttaattcacctgtcaaatagggacaatgataattcatactttacatggtactgtgagaataaaataagattacacaggtaaagttattcctacaaggctgggtacacagaagtactaagtgttgtcttccttttcttaaaagtcccctcctttggcatggcactctctccaaacgctcaacttcctcttttaaactccacctttgtgttgtttcttaatacctcagctttcaaaacattcttcaatcaatgttaatgacaccaaatcaaagagtctgattctaaaatctgaatcgaggtctggtcacctaacttcacatcttcatcaaatccaaaaatcaagctaatccctcttcctcctgaaacagagtctctcttcccaatttcttttaatacctccatttctctatttatcagccaaaaattcatttttcacttttttcatcctctttattttttattcagtcatcaaatcatataagctatcaaaatctctcttttagctgggcacagtggctcacgcccataatctcaacactttgggaggctgaggtgggaggatggcttgagctcaggagttcaagaccaggctggccaacatagcgagattccacctctattaaaaaaaaatacaaaaattagctaggcatggtgttgtatgcctatagtcccagctaattgggaggctgaggtgggaggatcactccagcctgggaggttgaggttgcagtgagccaagatggtaccactgcactccagcctgagcaacagagtgagaccctgtctgaaaaaaacaaacaaacaaacaaacaaaaaaacccaactctgtttcacttgtgccttccaaacacagcttttgtcatatcacttccctacccccaaatcttcaagatccccaatacctcccagaccaagtccaaattcctcaatctttgatatcttttgatagcttgaaattctttccccatgaagctcctcatgtttaaaatttccagcttcttccttctcatgtatccacatccttacttaagggttcagctcagtgcaaccatctcatgaagcaactactgaccattccagttctgcacgtgtatcttcttctctgaacttttactgcatgcttttcctcaatcagatattgcctggctctattatttaattctttcagttgtaggtattgtctttgaaacaagaccatgagcaaggaatatgtcacaattctattttgtctaaaacagtgctgcatacataaaggtagtgcaataactacttgtttaataaataatacatacaagtaggagccaaaaaatttaaatgccaataactagtctagtctttcatgtgacttagaagccctgcttcaaacgctaaagaaagctaaaaagcgctagccagtctgtgaactgaatattcctcatccgtaaattaaaagtggctagtaaagggatctatgtatttttatggattccttttcagtatctgcaacaaaaaagtctatgcaaagattaaatctacaaaattgtaaatgcatatctctcatggaaattcttttcttaattcaattctgtagcatgctttgcatcgcatgttgatcaatttagaaataatatttagtcaaggctgctaatactactaagattaattagtagaaataaatgcatatctgaaaatgttcaatgacactgcaattttattacttgcataatatttggtaggaattgtattaagcactagggatccctgaacatggtctctgttctcaagaagtatactataaaaaatgttgaatcaacaatagtatgaaaatcaatccatcccagtcataaactcagcactgtgagaggacactgagcagcctggtgtgtctgacccataagatttgtgggagcaggtggaggtgatgacatcgaagaggtaggctgggccgaccacagagtctgtaatgctctctgaaaggggatgaaatataactatggactggaggatgatggaaacgatggattgcttggtcagagagttaatctgcaataacccaaatgaggaataaggaaaacctgaactaaaacaataatcaatggaaataaaatggttagaaaaatttatagtagcagcgatcagtaggttcctatacagaaagattttctgtctccctccgcctccaccctgtagcatttggcacctgggggcagaagtgtatcaaaaaaatgaattattcttagactctcatttgctgttgctattacttttattccaaagtctgatgcataaattagttaccccatatatattaagaacattcattagtgagactttttataacttccatgtatcagagggaagcaagacactccaccacatgccagccaccactcatcccagcccagctgatcttcagaaggccatgaacttaaaggaagtgagtccacgccatcggacacagaggccacacattttaaaggggtgactgctgccattaagcataaagtcagcttttcctggtaaatatgtggtagggtactgatgtgggcctctaacatctcacacttttcatgctggtgtataacataaaagagaaaactgaattaattaacacaatgaaggagcttaatgcttttcccaaacaaaaatattaaaaagatattgaatcattgcagagattctttgaactcacatcacatagataagcatgtaaaaaacaatttagtcttctcttctcttttctttttctttgacagggtctcactctgtccctcaggctggagtgcagtggtgcaattatggctcactgcagccttgacctccctgctcaagtgatcctcctgcttcagccacctgagtagttgggattactggcgggcgccaccatgcttggctaatttttttattttaatttttgcagagacagggtctcactatgttgcttacgctggtctccaactcttggcctcaagccatcctcccacctgggcctcccaaactgctgggattacaggtgtaacccacccacctggcctcccaaactcctgggattacaggtgtgacccacccactgtgtctggcctatatttcttatagtaatatagttattgtggggtctgaaacagaaataaataaatgcagaaatatctaagtactttcaacaaatggctcatgctacagatcagtttctagcaggcagagcacccaagtatgttcctataaatcttaaattaatgaaaacacattattaccagcaaggaaataaatactagtagatattggtatttattcagacaataccaaaagacaaacaccacattctgttcagctttaatttgtagtaagaaagcaaggacgcacattcctctagcgatacatacatgcatacatacatacatatatatatgcacgtatatatacataaatgtccaagatgcatttctaacaacgcatcctcaaaacaggttagttactacgtgctaggaaacaatcaatccttactgcaaaatgtaatacctctgtatgcagcataagggagcagtttccatttacattccatcccttgaagaattacttagatttgaccagtgagtggggcactgattagcgtgtaccggtgactgttagctcgagtaagttactcaacctctttctattttgatttattcatttggaaaagataaaaaagtcaaggcaattattacagtaataccataaatatacgccgtaaattatttctaaaccctttatatatttgatcttacttgatccttaacataaacctttcttacttaacaggtaaggaaacttaaacgatggccaaagaacagaagaggaaagacagtagtaactcagtgacctggctcccaaagcagtgaatttccctggaacaacatggttaaggttcttccaaagtataactaaaaggtcagcatcagttaaaaaaaaaaaaagtaaaaattgagtattaaatatctctatagtaataggaaattactattgtatgtaattatcacaatacttcatgagtaatatactttatatttccagtgaaag

SEQ ID NO: 4 - DNA, 8949 bp, Homo sapiens
aaaacaaacaaacaaacaaaagtatcccataataaccaaaacatatatttttatagctcttttaaaatagaaggtgaaataagtttaccgtaacttcctagaatttcatttaataattaaatgagatcacgcctgtaatcccggcactttgggaggccaaggcgggcggatcatgaggtcgggagattgagaccaacctggctaacgcagtgaaaccccatctgtactaaaaatacaaaaaaattagcagagcgtagtagcgggcgcctgtagtcccagctactgggcaggctgaggcaggagaatggcctgaacccaggaggcagagcttgcagtgagctgagatcgcgccactgcactccagcctgggcaacacagtgagactccgtctccaaaaaaaaaaaaaaaaaaaaaagggagtttcgttcttgttgcccggcctggagtgcaatggcgtgatctcagctcactgcaacctccgcctcctgggttcaagtgattctcctgcctcagcctcccgagtagctgggattacaggaacacaccaccatgcccagctaattttgtatttttagtagagagggggtttctgcaatgttggtcagactggcctcgaactcctgacctcaggtgatccactcgcctcggcctcccaaagtgctgggattacaggagccacggcacccagccgaactctacttttcaacccgagaattactgttcaatcagtttagattacagattgttcttttgcaggccaattttgccatttcttctcttcaaataggacatcgtaaaaacctcatgttaataatatgtatatgtataataatatgcataatgatatgcatatacgtatattacatataatacacatacatgcatatacgtatattacatataatacacatacatgcatatacatatattacatataatacacatacatgcatatacgtatattacatataatacacatacatgcatatacgtatattacatataatacacatacatgcatatacgtatattacatataatacacatacatgcatatacgtatattacatataatacacatacatgcatatacgtatatacctataatacgtatatacgtatacgtatatacgtattataggtatatacgtatatacgtattataggtatataagtgtgtatatatatatatttttgagacggagtctcactctgtcacccaggctacagtgcaatagcatgatctcagctcaatttccgcctcctgggttgaagggattctcttgtctcagcctcccaagtagctgggattgcaggtttgtgccaccacacccagctaatttttgtatttttagtagagacagagtttcaccgtgttggccaggctggtctcgaactactgacctcaggtgatttgcctgccttagtctctcacagtgctgggattataggcgtgaggcacggcgcccagccttaactcagtatatgttgccaaaagtgaaaataatcatccatagtaagcctcaaaatctcctttaaataaagttctgctattattattattattattattattttttttttgagacagagcttccatctgtcacccagaccagagtgcagtggcacaatcttggctcactgcaacctgcgactcctgagttcaaggaattctccctgcctctgcctcccaagtagctgagattacaggcacccaccaccacacctggctaagttttgtatttttagtacagacagggttttgccatgttggccaggctggtctcgaactcctgacctcaggtgttccacccgcctcggcctcccaaagtgctgggattacaggcgtgagccactgtgccaggcctctattatttcttaaagggtagtccatatatgaagtaataaaagttcatgatgctgtttctgacatggatgtactgatactgaattatgaccaagcttttcatcactcttagataactgaaaccataaagcttgaagatattttagttctgaaaaattggtctatattctcaatcccaaagtaactgggtttttgttgttgctgctgttgtttcaaacgaggtcaccacatgccttttaaggggtggggtggagaatgtatttgcacaaaaaaactccaacatttgtatgctcaacgatgtgtactgacgacttgcagcatggaaggctgaatgttagacagtatcatacattcattcgacaaatatttactgagtatttactatgggccaagcacaatttaaggtattgggaaagtggcagtgaacaacataaaccaaaaaaactctgccttcatgtagtttacttatatacaaagataaattagaccttgctaatcagtttagactccaatggaagagacaagtgtgaaaatctttttaaatgataaatattttgcaataaacaaagtgctatatcaaattcacacttaaaaattctgaaatctaggtcgggtgcagtggcttgtgcctgtaatcccagcactttgggaggccgaggcgggaagatcatgaggtcaggagatcgagaccagcctggccaacatagtgaaaccccgtctctactaaaaacacaaaaataagccaggcgtggtggcatgcgcctgtagtcccagctacttgggacgcagaggcaggagaatcccttgaacccaggagacggaggttgcagtgagccaagattgctccactgcactccagcctgggcaacagagcaagactccatctcaaaaaaaaaaaaaaaaaattgaaatcagaggaggaaatgattttttctttttctttttttttttttttgagagagtctcactctgtcgcccaggctggagtgcagtggcaccgtgtcggttcattgcaacctctgcgttgccaggctggagtacagtggcacaatctcagctcactgcaacctctgtctcctgggttcaagcgattctcctgcctcatcctcccgattagctgggattacaggcgcccactaccatgtcgggctaatttatttatttatttattctttgagatggagtctcgctctgtcgcccaggctggagtgcagtggcgtgatcttggctcactgccagctccgcctcccgggttcacgccattctcctgcctcagcctcctgagtaactgggactacaggcgcccaccaccacgcccggctaattttttgtatttttagtagagatggggtttcaccgtgttagccaggcttgcctcgatctcctgacctcgtgatccgccctcctcggcctcccgaagtgctgagattataggcgtgagccactgcgcccggccactcctggctaatttttgtatttttttttctttttttcttttttttttttttcagtagagacaaagtttcaccacgttggccaagctggtctcaaactcctcacctcaaatgatccacccaccttggcctcccaaagtgctgagattagaggcgtgagccactgcgcccggccagtaagggattcctttacaggggatagatactttgttttttttctgctttccccacaaactgttacctagctgtgttatttgaataaatttttctttccttctctctgtctctgatcctggttatatggacacaaaatatccctccctgcattattttccagtgtcaagcaattatccctttctctctcgcattttatagaactttctaaactggtccaatcattttatcgatattcccagtcttagtcctttttctgaaaactaaattccacaaatacctgttgaaaactacattccacaaatacctgttgaaaactactcagtgctctcctgggatgaaaaagataaagggtggtagaagtagttttaactctttttacagctgtggaaacaaaggcccgggaggtgaagaaaactgacccggggccacagcaacatcagctacgcacacacaaaacaggcaccagggcagcatccacagtttaggaaggaagacaaaccgattgacaggtaaatgaagttattgaaaagcagcttctaattcaaaggcacagctaaggactgtgaccgtcttacttttcagttcatgtatctagttaggggtgagagcttgggcttgcaattccctcagtggttcttcaactccttaggagataggagttgggggagtcccaagtaatagtttgtggggaaagcagaaaaaaaataaataataagaaaagaaaaaactatcccctgtagaggaatcccttattaatgccagccattaacacgagccgacatcctggacaaatataagaaatttgtctcaacaatccaagtaaaacaatacattttctttcgttttttttttttttttgaaacggagtcttgctcttgtcgtccaggctggagtgcagtggcaccatctcagctcactgcaatccctgcctcctgggttcaagtgattctcctgcctcagcctcctgggtagctgggattacaggcacctgccacgacgcctggctaatttttgtactgttagtagagacggggtttcgccagttgttgccaggctggtcttgaactcctgacctcaggtgatccgcccgccttagcctcccaaagtgctgggattacaggcgtgagccaccgtgcccggccaacaatacgttttcataaaagatttccttctgctagaatcagacgcttgtgcttcatgtgaacttaggtaagaaatattaaatagtaatacacagtccctccaccccctgctatttatctttttttcccctttttaaaaatacatttttgaaatttaaggatgcctgctgcctgtgaagtcccagccccaggaagtcctgatgacatgtgccctctttcctttttttttttttctttttgagacaggttcttgctctgtcccctaggctggagcacagtggctcaatctcagctcactgcagcctcaaactcctgggctcacacgatcctcctacctcagcctccggagtagctgggactacagatgcgcagcaccatgcccagctaatttttgtactttggtagagatggggtttcaccatgctggccaggctggtctccaactcctgagctcaagtgatcctcctgtcttggcctctcaaaatgctgggactacaggaatgaggcaccacgcccagcctccgatatttcactgaagcaaaaataaaattcaaccctgtcaattggtaatttggagtaaaccagagcataacatttttcaagtttgatataaggaagaatttaccttaccactaggagtgtgtgaggtgactgttaaagcagatttcttggcgaggcacggaggctcaggactgtaattccagcactttgggaggccaaggcaggaggactacccgaggccaggagtttgagaccagcctgggcaacatagtgacatagtgagatcttgtctaagaaaaaaaaaaaaaaaagaaagcaagcagattccttgtcatctagcgattctgatatagctgggccttgaatcaagcttttgagagacaggagagagatcacaggctaaataaatcatggaatttcttccctagcagcattttagtgaactgattttacctgtttgcgacagtttaaatgagatcctgactgaagttactgaggtgaagcagatgacttttttcaaggtctcctccaccataaagactttcaaccttatgctttccataacatgcagaacccctgataagcataaatgtaggcgttttatttaaaaaggtaatgattttgtgtctgggcaaacctcaccttgggtctgttttcttgtcaccaaaaataggaaaaacatactattcttacttcaaccttgcgttgttctatgatgtccttcggtgataaacacatcttggtcctgccactgaactagctgtgtgtctgcctgcattgaccttccttggcctcaatggtaaaatgggtatctagtagatccctaataatctgtctagtcttcaaattattattattattattattattattattattttgaggcagaatctcactctgtcacccaggctggagtgcagtggcccgatctcagctcactgcaagctccgcctcccgggttcacgccattctcctgcctcagcctccggagtagctgtgaccacaggcgcccaccactatgcccggctaattttttatatttttagtagagacggggtttcacctgtgttagccaggatgctctcgatttcctgacctcgcaatccgcctgcctcagcctcccaaagtgttgggattaccggtgtgagccaccgcgccctgcgccttcaaattatagaaacatctttatgaaacaagttcaattgaaagtcatgtaaaagagaaggtacaatcccctagttattaaacagaaaacaaacaaacaccaaacttccttatccaaagtatctaagaatttggaatatatataaatagggccaggtgtggtgactcacacctgtaatcccagcactttgggaggctgaggcaagaggatcgtttgagcctaggagttcaagaccagcctgagcaatataattatagacactgtattaaaaaaaaaaagttagctgggcatggtggtgcgtgccttgtagtcccagctactcaggaggctgaggtgggaggattgattaagtcaagtagttcaaggctgcagtgagctgtgttcaagtcactgcatcccagcatgggctatggaggaaggctctgtctcagaaacaaacaaaacgggtaaatattgtatcttcctactgagtcttctagtactaggctgtaacacacattgcctcaatctctctttttattaaataaaaagtgctaaaagcatacacttccaaagataaaatcttaactaccaaaattatattttagtgaaattgtaacctaatatttactataatggatgtactatttactatagtagatgtaactggaagataccttccagttatgcgttcttttccagttacaagtgctttaaacactttgacttccctttatgtcagagtctgatttcttgactacatgcactctagactggcttttgaaaacaagactatatttgcatatttatatcggtatgtccatagcaggattcaaaatccagaatctattacttcattttacattgcagaatcactttgataatgccgaagtggcaattttcttcaaaggtattgttttcaaaatgaatttgtttgaatacccaacctctaatcagctacatacatatacaatcaaaatctccaatgtccttacattacctgtaagattttttttaaaaaaaaatcagcaaaacttgttttatgagctttttgcaatggtgtgatctcggctcactgcaacctccgcttcccaggttcaagcaattctcctgcctcagcctcctaagtagctgggactacaggtgcgtgccaccacgcccagctaatttttgtattttcagtggagacagagttcttttttttttttctttttacctaacagcttgcatatttattgaacaaatactactaaaatagctaaaatacattgggtacttgtcatgagtgcatcagtaaagatcacactgttacaaaagcctgcattttcagcagtacacaactgcaactctacataaataccacggatgcagaatactgttttcttgctctatttacacagctgatatacctattctaacgaaggagggagaggaggaatgcacaagaaactcaggccaatgggggagcaagaaaacgaagaagtgcagtgcatgcgtcatcagtgtttaacagtcagaagcataacagttcagaacaagggctgtcctatcaaaagaagagctgaaagacagttatatgaaaattaaggtgggcgttcagactggctaacacaacaacattccatgagtagatggtattttatttttgtttatccatttcgttgggagcaaggacaaaaatgtaaacctataccttgcttatcaaaattgccaaaaaaagaatgctctgccttttaaaaaagtattgtgattttgtaaagacattgttttccaatgtaatatttggaaaaggtgtcatttccatattcctactcagatgccagtgttttgggtttttttcagggggaatttatttaaaaaggttttgctctttttttccacaaatatcctttcaaacagaaagaacccaaagagacacctcaaaatgcctgtaaaattattgcttttctttctgtaagtcaggcaggcgaggctatagaaaggaagagatttggtaagtaaattacagttttgtgattgctcccgctaccgtgactgcatgtccgtgagtgccagccaatgagacaatcgtctctcacacttcggtagcattcgctcaacctacaacactgaggaagaaagccacactgaagacacaaggaaaacaagtcaatccagtctagagaaaaacattcagcgaaacagagtaccaacaccttcttagaacatggaaataaaaaataaccccatcagagctacctcgccaaggagcatgatgaaagtccaaaatagcaccattcatcagtgtctcaggtcctgtggcagcatctcggtcacttaccacaaggaaacgagtttcaaactatgtctatacatcaagagtacatggataaaatatagagatatacagacaattgataaacataaactactaggtttgttacatctaaatgaagaaaaagggggggactctcagcctctgcaagaagcggtcgggagctgtgtgagtgaaaaggcaggagtgcactggttgtgtgaacgcggtgggaatttgagttgtggaagacattgttgtagcgaaccaggcctgaaggcccacctgtaagggttgtaaacgtggattcacagtgtgaaattctgagcattttcacttgggtcagaatgattaaaaactggtttgatgat

SEQ ID NO: 5 - protein, 1953 aa, Homo sapiens
MGVKKKKEMQVAALTICHQDLETLKSFADVEGKNLASLLLHCVQLTDGVSQIHYIKQIVPLLEKADKNGMCDPTIQSCLDILAGIYLSLSLKNPLKKVLASSLNSLPDFFLPEAMHRFTSRLQEELNTTDLYSYRKVTDNISSCMENFNLGRASVNNLLKNVLHFLQKSLIEILEENRKCAGNHIIQTQLMNDLLVGIRVSMMLVQKVQDFQGNLWKTSDSPIWQNMCGLLSIFTKVLSDDDLLQTVQSTSGLAIILFIKTMFHPSEKIPHLISSVLLRSVDCTSVPEWFMSSCRSLCCGDISQSAVLFLCQGTLAMLDWQNGSMGRSGEALLLDTAHVLFTLSSQIKEPTLEMFLSRILASWTNSAIQVLESSSPSLTDSLNGNSSIVGRLLEYVYTHWEHPLDALRHQTKIMFKNLLQMHRLTVEGADFVPDPFFVELTESLLRLEWHIKGKYTCLGCLVECIGVEHILAIDKTIPSQILEVMGDQSLVPYASDLLETMFRNHKSHLKSQTAESSWIDQWHETWVSPLLFILCEGNLDQKSYVIDYYLPKLLSYSPESLQYMVKILQTSIDAKTGQEQSFPSLGSCNSRGALGALMACLRIARAHGHLQSATDTWENLVSDARIKQGLIHQHCQVRIDTLGLLCESNRSTEIVSMEEMQWIQFFITYNLNSQSPGVRQQICSLLKKLFCRIQESSQVLYKLEQSKSKREPENELTKQHPSVSLQQYKNFMSSICNSLFEALFPGSSYSTRFSALTILGSIAEVFHVPEGRIYTVYQLSHDIDVGRFQTLMECFTSTFEDVKILAFDLLMKLSKTAVHFQDSGKLQGLFQAALELSTSTKPYDCVTASYLLNFLIWQDALPSSLSAYLTQQVACDNGDRPAAVVERNTLMVIKCLMENLEEEVSQAENSLLQAAAAFPMYGRVHCITGALQKLSLNSLQLVSEWRPVVEKLLLMSYRLSTVVSPVIQSSSPEGLIPMDTDSESASRLQMILNEIQPRDTNDYFNQAKILKEHDSFDMKDLNASVVNIDTSTEIKGKEVKTCDVTAQMVLVCCWRSMKEVALLLGMLCQLLPMQPVPESSDGLLTVEQVKEIGDYFKQHLLQSRHRGAFELAYTGFVKLTEVLNRCPNVSLQKLPEQWLWSVLEEIKCSDPSSKLCATRRSAGIPFYIQALLASEPKKGRMDLLKITMKELISLAGPTDDIQSTVPQVHALNILRALFRDTRLGENIIPYVADGAKAAILGFTSPVWAVRNSSTLLFSALITRIFGVKRAKDEHSKTNRMTGREFFSRFPELYPFLLKQLETVANTVDSDMGEPNRHPSMFLLLLVLERLYASPMDGTSSALSMGPFVPFIMRCGHSPVYHSREMAARALVPFVMIDHIPNTIRTLLSTLPSCTDQCFRQNHIHGTLLQVFHLLQAYSDSKHGTNSDFQHELTDITVCTKAKLWLAKRQNPCLVTRAVYIDILFLLTCCLNRSAKDNQPVLESLGFWEEVRGIISGSELITGFPWAFKVPGLPQYLQSLTRLAIAAVWAAAAKSGERETNVPISFSQLLESAFPEVRSLTLEALLEKFLAAASGLGEKGVPPLLCNMGEKFLLLAMKENHPECFCKILKILHCMDPGEWLPQTEHCVHLTPKEFLIWTMDIASNERSEIQSVALRLASKVISHHMQTCVENRELIAAELKQWVQLVILSCEDHLPTESRLAVVEVLTSTTPLFLTNPHPILELQDTLALWKCVLTLLQSEEQAVRDAATETVTTAMSQENTCQSTEFAFCQVDASIALALALAVLCDLLQQWDQLAPGLPILLGWLLGESDDLVACVESMHQVEEDYLFEKAEVNFWAETLIFVKYLCKHLFCLLSKSGWRPPSPEMLCHLQRMVSEQCHLLSQFFRELPPAAEFVKTVEFTRLRIQEERTLACLRLLAFLEGKEGEDTLVLSVWDSYAESRQLTLPRTEAAC

SEQ ID NO: 6 - protein, 1387 aa, Homo sapiens; identical to SEQ ID NO: 2

SEQ ID NO: 7 - protein, 1353 aa, Homo sapiens
MGVKKKKEMQVAALTICHQDLETLKSFADVEGKNLASLLLHCVQLTDGVSQIHYIKQIVPLLEKADKNGMCDPTIQSCLDILAGIYLSLSLKNPLKKVLASSLNSLPDFFLPEAMHRFTSRLQEELNTTDLYSYRKVTDNISSCMENFNLGRASVNNLLKNVLHFLQKSLIEILEENRKCAGNHIIQTQLMNDLLVGIRVSMMLVQKVQDFQGNLWKTSDSPIWQNMCGLLSIFTKVLSDDDLLQTVQSTSGLAIILFIKTMFHPSEKIPHLISSVLLRSVDCTSVPEWFMSSCRSLCCGDISQSAVLFLCQGTLAMLDWQNGSMGRSGEALLLDTAHVLFTLSSQIKEPTLEMFLSRILASWTNSAIQVLESSSPSLTDSLNGNSSIVGRLLEYVYTHWEHPLDALRHQTKIMFKNLLQMHRLTVEGADFVPDPFFVELTESLLRLEWHIKGKYTCLGCLVECIGVEHILAIDKTIPSQILEVMGDQSLVPYASDLLETMFRNHKSHLKSQTAESSWIDQWHETWVSPLLFILCEGNLDQKSYVIDYYLPKLLSYSPESLQYMVKILQTSIDAKTGQEQSFPSLGSCNSRGALGALMACLRIARAHGHLQSATDTWENLVSDARIKQGLIHQHCQVRIDTLGLLCESNRSTEIVSMEEMQWIQFFITYNLNSQSPGVRQQICSLLKKLFCRIQESSQVLYKLEQSKSKREPENELTKQHPSVSLQQYKNFMSSICNSLFEALFPGSSYSTRFSALTILGSIAEVFHVPEGRIYTVYQLSHDIDVGRFQTLMECFTSTFEDVKILAFDLLMKLSKTAVHFQDSGKLQGLFQAALELSTSTKPYDCVTASYLLNFLIWQDALPSSLSAYLTQQVACDNGDRPAAVVERNTLMVIKCLMENLEEEVSQAENSLLQAAAAFPMYGRVHCITGALQKLSLNSLQLVSEWRPVVEKLLLMSYRLSTVVSPVIQSSSPEGLIPMDTDSESASRLQMILNEIQPRDTNDYFNQAKILKEHDSFDMKDLNASVVNIDTSTEIKGKEVKTCDVTAQMVLVCCWRSMKEVALLLGMLCQLLPMQPVPESSDGLLTVEQVKEIGDYFKQHLLQSRHRGAFELAYTGFVKLTEVLNRCPNVSLQKLPEQWLWSVLEEIKCSDPSSKLCATRRSAGIPFYIQALLASEPKKGRMDLLKITMKELISLAGPTDDIQSTVPQVHALNILRALFRDTRLGENIIPYVADGAKAAILGFTSPVWAVRNSSTLLFSALITRIFGVKRAKDEHSKTNRMTGREFFSRFPELYPFLLKQLETVANTVDSDMGEPNRHPSMFLLLLVLERLYASPMDGTSSALSMGPFVPFIMR

SEQ ID NO: 8 - protein, 1353 aa, Homo sapiens
MGVKKKKEMQVAALTICHQDLETLKSFADVEGKNLASLLLHCVQLTDGVSQIHYIKQIVPLLEKADKNGMCDPTIQSCLDILAGIYLSLSLKNPLKKVLASSLNSLPDFFLPEAMHRFTSRLQEELNTTDLYSYRKVTDNISSCMENFNLGRASVNNLLKNVLHFLQKSLIEILEENRKCAGNHIIQTQLMNDLLVGIRVSMMLVQKVQDFQGNLWKTSDSPIWQNMCGLLSIFTKVLSDDDLLQTVQSTSGLAIILFIKTMFHPSEKIPHLISSVLLRSVDCTSVPEWFMSSCRSLCCGDISQSAVLFLCQGTLAMLDWQNGSMGRSGEALLLDTAHVLFTLSSQIKEPTLEMFLSRILASWTNSAIQVLESSSPSLTDSLNGNSSIVGRLLEYVYTHWEHPLDALRHQTKIMFKNLLQMHRLTVEGADFVPDPFFVELTESLLRLEWHIKGKYTCLGCLVECIGVEHILAIDKTIPSQILEVMGDQSLVPYASDLLETMFRNHKSHLKSQTAESSWIDQWHETWVSPLLFILCEGNLDQKSYVIDYYLPKLLSYSPESLQYMVKILQTSIDAKTGQEQSFPSLGSCNSRGALGALMACLRIARAHGHLQSATDTWENLVSDARIKQGLIHQHCQVRIDTLGLLCESNRSTEIVSMEEMQWIQFFITYNLNSQSPGVRQQICSLLKKLFCRIQESSQVLYKLEQSKSKREPENELTKQHPSVSLQQYKNFMSSICNSLFEALFPGSSYSTRFSALTILGSIAEVFHVPEGRIYTVYQLSHDIDVGRFQTLMECFTSTFEDVKILAFDLLMKLSKTAVHFQDSGKLQGLFQAALELSTSTKPYDCVTASYLLNFLIWQDALPSSLSAYLTQQVACDNGDRPAAVVERNTLMVIKCLMENLEEEVSQAENSLLQAAAAFPMYGRVHCITGALQKLSLNSLQLVSEWRPVVEKLLLMSYRLSTVVSPVIQSSSPEGLIPMDTDSESASRLQMILNEIQPRDTNDYFNQAKILKEHDSFDMKDLNASVVNIDTSTEIKGKEVKTCDVTAQMVLVCCWRSMKEVALLLGMLCQLLPMQPVPESSDGLLTVEQVKEIGDYFKQHLLQSRHRGAFELAYTGFVKLTEVLNRCPNVSLQKLPEQWLWSVLEEIKCSDPSSKLCATRRSAGIPFYIQALLASEPKKGRMDLLKITMKELISLAGPTDDIQSTVPQVHALNILRALFRDTRLGENIIPYVADGAKAAILGFTSPVWAVRNSSTLLFSALITRIFGVKRAKDEHSKTNRMTGREFFSRFPELYPFLLKQLETVANTVDSDMGEPNRHPSMFLLLLVLERLYASPMDGTSSALSMGPFVPFIMS

SEQ ID NO: 9 - DNA, 5580 bp, Homo sapiens
agtcgaccgtggaccgcgctgcgagcctcggagacgccgtagaaggagacctgcttccgggactggaccaggcgcctgcgactcttctcagacgccgacgtgcacgagtgactactattaattctatttaaaatgggtgtaaagaagaagaaagaaatgcaagttgctgcgctgaccatttgccatcaggaccttgaaactttgaaatcttttgctgatgtggaagggaaaaatctagcttctttgctgttacattgtgtgcaactcacggatggagtgtcacaaatccattatattaaacagattgtgcctctgctggagaaagcagataaaaatggcatgtgtgatcccactattcaaagttgtttggatatcttagcaggcatttatctttctttgagtctaaagaatcccttgaagaaagtattggcaagctcactaaatagcctgcctgatttttttctacctgaggctatgcaccgttttacttctcgtcttcaggaagaattgaatactactgacttatactcttacaggaaagttactgacaatatttcttcctgtatggagaactttaacttgggtagagcaagtgttaataatctgcttaaaaatgtgcttcattttctgcagaagagtttaattgaaatcctggaagaaaatagaaaatgtgctggaaatcatattattcaaacacagttgatgaatgacttactggtaggcattagagtttcaatgatgttagtacagaaagtacaagatttccagggaaatctttggaagacttccgattctcccatatggcaaaatatgtgtggattgctgagtatttttaccaaggttttaagcgatgatgatctgttacagactgtacagagcacatctggattagctattattctttttattaagactatgtttcacccgtctgaaaagattcctcatttgattagcagtgtgctgcttcgttcagtggactgcaccagtgtccccgagtggtttatgagcagctgcaggagcctctgttgtggtgacatctctcagtcagctgtcttattcctctgtcaggggacacttgccatgttggactggcagaacggaagcatgggtcggagtggggaggccctgctcttggatactgcacatgttttgttcaccttgagttcacagattaaagagccaacgctggaaatgtttctgtctagaatcttagcatcctggactaattcagccatacaagtccttgaatcaagttccccgagcctaacggacagcctgaatgggaattcaagtatagttgggagacttttggaatatgtctatacccattgggaacatccattggatgctctgagacaccaaaccaaaatcatgttcaaaaaccttctccaaatgcaccggctcactgtggaaggtgcagatttcgtccctgatcctttctttgtggaattgactgagagtcttttacgattggaatggcatattaaaggaaagtacacgtgccttggttgtttggtagagtgcataggagttgaacatattttggctatagataaaactattccatctcaaatcttagaggtgatgggagaccagtcattggtaccttatgcaagtgacctcttggaaaccatgtttagaaatcataagagtcatttgaaatcccagactgctgagagttcttggattgaccagtggcatgagacttgggtttctcctctcctttttatattgtgtgaaggaaacttggatcaaaaatcttacgtgattgattattacttgccaaaattattaagttacagccctgaaagcttacagtacatggtaaagattcttcagacttctattgatgctaaaactggacaagagcaatctttcccatccttagggtcttgtaatagcaggggggctctgggagctttgatggcatgtctgcgaatagctagagctcatggacatcttcagtctgcaactgatacctgggagaacctcgtgtctgatgcaagaataaagcaaggcttaattcatcagcattgccaagtaaggatagatacattaggcttgctttgtgaaagtaatcggagcacagaaattgtttccatggaagaaatgcagtggattcagttctttattacatacaatcttaacagccagtctccaggagtgcggcaacagatctgttctcttcttaaaaagttgttttgtaggatacaggaaagttctcaggtactttataaattggagcagagtaaatccaaacgtgaaccagagaatgagttaaccaaacagcacccttctgtttctttacagcagtataagaatttcatgtcatccatttgtaacagtctttttgaagcattgtttcctggatcttcctactcgactagattttcagctttaaccattttaggttcaatagctgaagtttttcatgtcccagaaggcagaatttatacagtatatcagctgagtcatgatattgatgttggtcgtttccaaacactaatggaatgttttaccagcacttttgaagacgtgaaaattttagcatttgatcttctgatgaagttatcaaaaacagctgtacattttcaggattcggggaaactgcaaggcttatttcaggcagcattggagctcagcacaagcaccaaaccatacgactgtgtgacagcttcctacctgctgaacttcttaatctggcaggatgctctaccgtcatccttgtctgcctacttaactcagcaagttgcatgtgataatggagataggcctgctgctgtggtggaaaggaacacattaatggttatcaaatgcttgatggaaaatcttgaggaagaagtatctcaggctgaaaattctctgcttcaggcagcagcagcatttccaatgtatgggcgagtccactgtataacaggagctttgcagaagttatctctaaacagcctgcagttggtgagcgagtggagacctgtggtagagaagctccttttgatgtcctacaggctttccactgtggtgtctccagtcattcagagctcatcccctgaaggcctcatcccaatggacactgattcagagtcagcaagccgcttacagatgattctgaatgagattcagcctcgagatactaatgattattttaaccaagccaaaatattgaaagaacatgatagctttgatatgaaggacttgaatgctagtgtggtgaatattgatacttctacagaaatcaaaggtaaagaagtaaaaacatgtgatgtaactgcgcagatggtgctggtatgttgttggagaagtatgaaggaagttgctttacttttaggcatgttgtgccagcttctgcccatgcagcctgtgccagaatcttctgatggattattgacggtggagcaggtaaaagaaataggagattactttaaacaacaccttttgcagtccaggcacagaggagcatttgaattggcttatactggttttgtgaaactcactgaagtactaaacaggtgcccaaatgtgagtctgcaaaagctgccagaacagtggctatggagtgttttagaggaaattaaatgcagtgatccttcatctaaactctgtgctacaaggcgcagtgctggaattcctttctacatacaggcactgttggcatctgaaccaaagaaaggcagaatggatttgttgaaaataacaatgaaagagttaatctctttggctgggcctacagatgacatacagagtacagtcccccaggttcatgctttaaatatccttagagcattgttcagagatacgcgcctgggagaaaatattattccttatgttgctgatggagctaaggctgcaattctgggttttacatcaccggtctgggcagtgcgaaattcatccacacttctctttagtgccttgatcacaagaatttttggagttaaaagggcaaaggatgaacattccaaaacaaatagaatgacagggagagagtttttctctcgtttcccagaactctatccttttcttctcaaacagttggaaactgtagccaatacagtagacagtgatatgggagaaccaaatcgtcatccaagcatgtttctcttacttttggtgttggagagactctacgcttccccgatggatggtacttcttctgctctcagcatgggaccttttgttcccttcattatgaggaaaaacatactattcttacttcaaccttgcgttgttctatgatgtccttcggtgataaacacatcttggtcctgccactgaactagctgtgtgtctgcctgcattgaccttccttggcctcaatgctgatatacctattctaacgaaggagggagaggaggaatgcacaagaaactcaggccaatgggggagcaagaaaacgaagaagtgcagtgcatgcgtcatcagtgtttaacagtcagaagcataacagttcagaacaagggctgtcctatcaaaagaagagctgaaagacagttatatgaaaattaaggtgggcgttcagactggctaacacaacaacattccatgagtagatggtattttatttttgtttatccatttcgttgggagcaaggacaaaaatgtaaacctataccttgcttatcaaaattgccaaaaaaagaatgctctgccttttaaaaaagtattgtgattttgtaaagacattgttttccaatgtaatatttggaaaaggtgtcatttccatattcctactcagatgccagtgttttgggtttttttcagggggaatttatttaaaaaggttttgctctttttttccacaaatatcctttcaaacagaaagaacccaaagagacacctcaaaatgcctgtaaaattattgcttttctttctgtaagtcaggcaggcgaggctatagaaaggaagagatttggtaagtaaattacagttttgtgattgctcccgctaccgtgactgcatgtccgtgagtgccagccaatgagacaatcgtctctcacacttcggtagcattcgctcaacctacaacactgaggaagaaagccacactgaagacacaaggaaaacaagtcaatccagtctagagaaaaacattcagcgaaacagagtaccaacaccttcttagaacatggaaataaaaaataaccccatcagagctacctcgccaaggagcatgatgaaagtccaaaatagcaccattcatcagtgtctcaggtcctgtggcagcatctcggtcacttaccacaaggaaacgagtttcaaactatgtctatacatcaagagtacatggataaaatatagagatatacagacaattgataaacataaactactaggtttgttacatctaaatgaagaaaaagggggggactctcagcctctgcaagaagcggtcgggagctgtgtgagtgaaaaggcaggagtgcactggttgtgtgaacgcggtgggaatttgagttgtggaagacattgttgtagcgaaccaggcctgaaggcccacctgtaagggttgtaaacgtggattcacagtgtgaaattctgagcattttcacttgggtcagaatgattaaaaactggtttgatgat

SEQ ID NO: 10 - protein, 1366 aa, Homo sapiens
MGVKKKKEMQVAALTICHQDLETLKSFADVEGKNLASLLLHCVQLTDGVSQIHYIKQIVPLLEKADKNGMCDPTIQSCLDILAGIYLSLSLKNPLKKVLASSLNSLPDFFLPEAMHRFTSRLQEELNTTDLYSYRKVTDNISSCMENFNLGRASVNNLLKNVLHFLQKSLIEILEENRKCAGNHIIQTQLMNDLLVGIRVSMMLVQKVQDFQGNLWKTSDSPIWQNMCGLLSIFTKVLSDDDLLQTVQSTSGLAIILFIKTMFHPSEKIPHLISSVLLRSVDCTSVPEWFMSSCRSLCCGDISQSAVLFLCQGTLAMLDWQNGSMGRSGEALLLDTAHVLFTLSSQIKEPTLEMFLSRILASWTNSAIQVLESSSPSLTDSLNGNSSIVGRLLEYVYTHWEHPLDALRHQTKIMFKNLLQMHRLTVEGADFVPDPFFVELTESLLRLEWHIKGKYTCLGCLVECIGVEHILAIDKTIPSQILEVMGDQSLVPYASDLLETMFRNHKSHLKSQTAESSWIDQWHETWVSPLLFILCEGNLDQKSYVIDYYLPKLLSYSPESLQYMVKILQTSIDAKTGQEQSFPSLGSCNSRGALGALMACLRIARAHGHLQSATDTWENLVSDARIKQGLIHQHCQVRIDTLGLLCESNRSTEIVSMEEMQWIQFFITYNLNSQSPGVRQQICSLLKKLFCRIQESSQVLYKLEQSKSKREPENELTKQHPSVSLQQYKNFMSSICNSLFEALFPGSSYSTRFSALTILGSIAEVFHVPEGRIYTVYQLSHDIDVGRFQTLMECFTSTFEDVKILAFDLLMKLSKTAVHFQDSGKLQGLFQAALELSTSTKPYDCVTASYLLNFLIWQDALPSSLSAYLTQQVACDNGDRPAAVVERNTLMVIKCLMENLEEEVSQAENSLLQAAAAFPMYGRVHCITGALQKLSLNSLQLVSEWRPVVEKLLLMSYRLSTVVSPVIQSSSPEGLIPMDTDSESASRLQMILNEIQPRDTNDYFNQAKILKEHDSFDMKDLNASVVNIDTSTEIKGKEVKTCDVTAQMVLVCCWRSMKEVALLLGMLCQLLPMQPVPESSDGLLTVEQVKEIGDYFKQHLLQSRHRGAFELAYTGFVKLTEVLNRCPNVSLQKLPEQWLWSVLEEIKCSDPSSKLCATRRSAGIPFYIQALLASEPKKGRMDLLKITMKELISLAGPTDDIQSTVPQVHALNILRALFRDTRLGENIIPYVADGAKAAILGFTSPVWAVRNSSTLLFSALITRIFGVKRAKDEHSKTNRMTGREFFSRFPELYPFLLKQLETVANTVDSDMGEPNRHPSMFLLLLVLERLYASPMDGTSSALSMGPFVPFIMRKNILFLLQPCVVL

SEQ ID NO: 11 - DNA, 6090 bp, Homo sapiens
agtcgaccgtggaccgcgctgcgagcctcggagacgccgtagaaggagacctgcttccgggactggaccaggcgcctgcgactcttctcagacgccgacgtgcacgagtgactactattaattctatttaaaatgggtgtaaagaagaagaaagaaatgcaagttgctgcgctgaccatttgccatcaggaccttgaaactttgaaatcttttgctgatgtggaagggaaaaatctagcttctttgctgttacattgtgtgcaactcacggatggagtgtcacaaatccattatattaaacagattgtgcctctgctggagaaagcagataaaaatggcatgtgtgatcccactattcaaagttgtttggatatcttagcaggcatttatctttctttgagtctaaagaatcccttgaagaaagtattggcaagctcactaaatagcctgcctgatttttttctacctgaggctatgcaccgttttacttctcgtcttcaggaagaattgaatactactgacttatactcttacaggaaagttactgacaatatttcttcctgtatggagaactttaacttgggtagagcaagtgttaataatctgcttaaaaatgtgcttcattttctgcagaagagtttaattgaaatcctggaagaaaatagaaaatgtgctggaaatcatattattcaaacacagttgatgaatgacttactggtaggcattagagtttcaatgatgttagtacagaaagtacaagatttccagggaaatctttggaagacttccgattctcccatatggcaaaatatgtgtggattgctgagtatttttaccaaggttttaagcgatgatgatctgttacagactgtacagagcacatctggattagctattattctttttattaagactatgtttcacccgtctgaaaagattcctcatttgattagcagtgtgctgcttcgttcagtggactgcaccagtgtccccgagtggtttatgagcagctgcaggagcctctgttgtggtgacatctctcagtcagctgtcttattcctctgtcaggggacacttgccatgttggactggcagaacggaagcatgggtcggagtggggaggccctgctcttggatactgcacatgttttgttcaccttgagttcacagattaaagagccaacgctggaaatgtttctgtctagaatcttagcatcctggactaattcagccatacaagtccttgaatcaagttccccgagcctaacggacagcctgaatgggaattcaagtatagttgggagacttttggaatatgtctatacccattgggaacatccattggatgctctgagacaccaaaccaaaatcatgttcaaaaaccttctccaaatgcaccggctcactgtggaaggtgcagatttcgtccctgatcctttctttgtggaattgactgagagtcttttacgattggaatggcatattaaaggaaagtacacgtgccttggttgtttggtagagtgcataggagttgaacatattttggctatagataaaactattccatctcaaatcttagaggtgatgggagaccagtcattggtaccttatgcaagtgacctcttggaaaccatgtttagaaatcataagagtcatttgaaatcccagactgctgagagttcttggattgaccagtggcatgagacttgggtttctcctctcctttttatattgtgtgaaggaaacttggatcaaaaatcttacgtgattgattattacttgccaaaattattaagttacagccctgaaagcttacagtacatggtaaagattcttcagacttctattgatgctaaaactggacaagagcaatctttcccatccttagggtcttgtaatagcaggggggctctgggagctttgatggcatgtctgcgaatagctagagctcatggacatcttcagtctgcaactgatacctgggagaacctcgtgtctgatgcaagaataaagcaaggcttaattcatcagcattgccaagtaaggatagatacattaggcttgctttgtgaaagtaatcggagcacagaaattgtttccatggaagaaatgcagtggattcagttctttattacatacaatcttaacagccagtctccaggagtgcggcaacagatctgttctcttcttaaaaagttgttttgtaggatacaggaaagttctcaggtactttataaattggagcagagtaaatccaaacgtgaaccagagaatgagttaaccaaacagcacccttctgtttctttacagcagtataagaatttcatgtcatccatttgtaacagtctttttgaagcattgtttcctggatcttcctactcgactagattttcagctttaaccattttaggttcaatagctgaagtttttcatgtcccagaaggcagaatttatacagtatatcagctgagtcatgatattgatgttggtcgtttccaaacactaatggaatgttttaccagcacttttgaagacgtgaaaattttagcatttgatcttctgatgaagttatcaaaaacagctgtacattttcaggattcggggaaactgcaaggcttatttcaggcagcattggagctcagcacaagcaccaaaccatacgactgtgtgacagcttcctacctgctgaacttcttaatctggcaggatgctctaccgtcatccttgtctgcctacttaactcagcaagttgcatgtgataatggagataggcctgctgctgtggtggaaaggaacacattaatggttatcaaatgcttgatggaaaatcttgaggaagaagtatctcaggctgaaaattctctgcttcaggcagcagcagcatttccaatgtatgggcgagtccactgtataacaggagctttgcagaagttatctctaaacagcctgcagttggtgagcgagtggagacctgtggtagagaagctccttttgatgtcctacaggctttccactgtggtgtctccagtcattcagagctcatcccctgaaggcctcatcccaatggacactgattcagagtcagcaagccgcttacagatgattctgaatgagattcagcctcgagatactaatgattattttaaccaagccaaaatattgaaagaacatgatagctttgatatgaaggacttgaatgctagtgtggtgaatattgatacttctacagaaatcaaaggtaaagaagtaaaaacatgtgatgtaactgcgcagatggtgctggtatgttgttggagaagtatgaaggaagttgctttacttttaggcatgttgtgccagcttctgcccatgcagcctgtgccagaatcttctgatggattattgacggtggagcaggtaaaagaaataggagattactttaaacaacaccttttgcagtccaggcacagaggagcatttgaattggcttatactggttttgtgaaactcactgaagtactaaacaggtgcccaaatgtgagtctgcaaaagctgccagaacagtggctatggagtgttttagaggaaattaaatgcagtgatccttcatctaaactctgtgctacaaggcgcagtgctggaattcctttctacatacaggcactgttggcatctgaaccaaagaaaggcagaatggatttgttgaaaataacaatgaaagagttaatctctttggctgggcctacagatgacatacagagtacagtcccccaggttcatgctttaaatatccttagagcattgttcagagatacgcgcctgggagaaaatattattccttatgttgctgatggagctaaggctgcaattctgggttttacatcaccggtctgggcagtgcgaaattcatccacacttctctttagtgccttgatcacaagaatttttggagttaaaagggcaaaggatgaacattccaaaacaaatagaatgacagggagagagtttttctctcgtttcccagaactctatccttttcttctcaaacagttggaaactgtagccaatacagtagacagtgatatgggagaaccaaatcgtcatccaagcatgtttctcttacttttggtgttggagagactctacgcttccccgatggatggtacttcttctgctctcagcatgggaccttttgttcccttcattatgaggtgtggtcactcacctgtctaccactcccgtgaaatggcagctcgtgccttggtcccatttgttatgatagatcacattcctaataccattcgaactctgttgtccacactccccagctgcactgaccagtgtttccggcaaaaccacattcatgggacacttctccaggtttttcatttgttgcaagcctactcagactccaaacacggaacgaattcagacttccagcacgagctgactgacatcactgtttgtaccaaagccaaactctggctggccaagaggcaaaatccatgtttggtgaccagagctgtatatattgatattctcttcctattgacttgctgcctcaacagatctgcaaaggacaaccagccagttctggagagtcttggcttctgggaggaagtcagagggattatctcaggatcagagctgataacgggattcccttgggccttcaaggtgccaggcctgccccagtacctccagagcctcaccagactagccattgctgcagtgtgggccgcggcagccaagagtggagagcgggagacgaatgtccccatctctttctctcagctgttagaatctgccttccctgaagtgcgctcactaacactggaagccctcttggaaaagttcttagcagcagcctctggacttggagagaagggcgtgccacccttgctgtgcaacatgggagagaagttcttattgttggccatgaaggaaaatcacccagaatgcttctgcaagatactgaaaattctccactgcatggaccctggtgagtggcttccccagacggagcactgtgtccatctgaccccaaaggagttcttgatctggacgatggatattgcttccaatgaaagatctgaaattcagagtgtagctctgagacttgcttccaaagtcatttcccaccacatgcagacatgtgtggagaacagggaattgatagctgctgagctgaagcagtgggttcagctggtcatcttgtcatgtgaagaccatcttcctacagagtctaggctggccgtcgttgaagtcctcaccagtactacaccacttttcctcaccaacccccatcctattcttgagttgcaggatacacttgctctctggaagtgtgtccttacccttctgcagagtgaggagcaagctgttagagatgcagccacggaaaccgtgacaactgccatgtcacaagaaaatacctgccagtcaacagagtttgccttctgccaggtggatgcctccatcgctctggccctggccctggccgtcctgtgtgatctgctccagcagtgggaccagttggcccctggactgcccatcctgctgggatggctgttgggagagagtgatgacctcgtggcctgtgtggagagcatgcatcaggtggaagaagactacctgtttgaaaaagcagaagtcaacttttgggccgagaccctgatctttgtgaaatacctctgcaagcacctcttctgtctcctctcaaagtccggctggcgtcccccaagccctgagatgctctgtcaccttcaaaggatggtgtcagagcagtgccacctcctgtctcagttcttcagagagcttccaccagctgctgagtttgtgaagacagtggagttcacaagactacgcattcaagaggaaaggactttggcttgcttgaggctgctggcctttttggaaggaaaggaaggggaagacaccctagttctcagtgtttgggactcttatgcagaatcgaggcagttaactcttccaagaacagaagcggcatgttgaagaaaatctgggggattgggatgggggtatgtgtggatttttcctccactaaatctgcaggaaacatgttgaacataaattcaaaaattttatccc

SEQ ID NO: 12 - DNA, 365186 bp, Homo sapiens
agtcgaccgtggaccgcgctgcgagcctcggagacgccgtagaaggagacctgcttccgggactggaccaggcgcctgcgactcttctcagacgccgacgtgcacgaggtttggctcccaggtgtcctgcctgccagacccgcggtagctcggctcggccagttttgctagggctgcctggcgagccacaccaattcccatcctttggtatcgccaggattcggcggctgtgaaactgatttccggtcgctaaggtctccatggagacagcactttaaccactttctcccactgtcattcctcgactccacgtggttcagaaatcgcccagagaatgtttgtgggagtcagccaggaaggtgtagagtgaagcagcgttctaaagggaagcagtaagtgggacctaggaggagtgtaatttactgggcaccttctggccttgcggtagacacgggatttacccccttggggaccctggttcttcaggacacacgtttaggcatcatttgagcaggcataattaccgagtctgcttttgtgtagccctcagaattgcaagagcaaatcctcctgcaaacttgcttacctttcaccagagaatagtctccctagttaggtttcccagtctcttctggctttgtacgatggtcactttcttaggaagcgtgcctctattcctctagatctgactatccctttacaaattattctgttgtcgacactttcctagctgcgtccatttttggttaagtggttgctcacctgccattactgtatggatttcttacttcccaaacagaccataggttcttaagatgtagaatgtcacttagatgtagaatgcattttaggtaccagatagtccaccttcctgcccttaaagacatatatcccttctagaacatctctgacaaatgtttgttaattaatttgtttattcgtgaagtgtttgttaaacacctactatgtgccaggcactggtttggaaattgagacttgaaacatgaacaaaatagattaaagttgctgccttcattcagtttgctactaggtgagacagacaatatacaaatttacaagttagggtaatttctggtactagtaagtgctatgaagaaaattaacggaaatggtgtctacgtgtgttgtattggtgagattttagatagagtggtcatggaaggcttttagaaggtaatgttgcagcagaaacatgaatggtgagaaggagtcagtcttgcaaagatgtggaatgaacattaaggggcagagatactgagaagtgtaaagcctcttaggtgggaataagagcatcaggaagtacaaagctcttgagatggtgaagaggagattggtttgagatgaagagtggaggaaggcagggtcagattatttagggccttgaagggcaaaatctcaagtatttatttatttatttatttatttatttatttgagatggagtttcgctcttgtctcccaggctggagtgcagtggcacgatctcggctcactgcaacctctgcctcctgggttcaagccattctcctgcctcagcctccggagtagctggggttataggcgcctgccaccacacccggctaatttttgtatttttagttagtgcagacggggtttcaccatgttggccaggctggtcttgaactcctgacttcaggagatccacccgcctcggcctcccaaagtgctgggattacaggcacgagcccccactcctggcctcaagtttgaattttattctaagtgtatttagaaacccttggaaagttttaaggaagagagtaagtaattcaatttgatgagagttttttttaaagagattgctttgatgattgtaaacagaatgggctctttggaggtaagtgtagaagtcaggagaccagttagggagctgtttcaggagtccaagagaaaatattcagtcatcttctctttgaatattcctggtgttggaaaatttctttgtttaaaaggtagcccagtccttagtgggaccatagagcttttcctttgtattgatctggaatctgtttccctgtagcttgtactgacttttactaatctaatagcaagacaagaagtctaaggctgggcgcggtggctcacgcctgtaatcccagcactttggggggccgaggtgggtggatcacgaggtcaggagatcgagaccatcctggctaacatgatgaaaccccgtctctactaaaaatagaaaaaattagccgggcgtggtggcgggcgcctgtagtcccagctactcgggaggctgaggcaggagaatggcctgaacccaggaggctgagcttgcagtgagcgcagatcgcgccactgcactccagcatgggcgaaggagcaagactccgtctcaaaaaaaaaaaaaaaaaaaaagtctgtagtagacaaataaatctattccctttttctccaaaacagtctagcagctgttttaaggctcttgttctgttgactttttctccaggccaaacacctttggttaactgagctgttctctgaaggaggtgctctctaggtccttcagaaatagttccattgtttgttatggctccttagagtatggccgccagcgctgtacctaatgctctacatgtcacctggcctgtttgaataaaatcatgcactctgatatggctgacttctgtggtttttggcagtcatcttgggctgttgagctgtttcaaaccacgttttgcctctccagcctctctttctgtgtttttttcccctaaactaaatgcagccctttgtatttatttctgtttcatcttggtaaatttcatattgctcgttattccagtttattgacctgtttttattcctgattccatcattcaacatgtccttccagatttattttatacatgtactacattatagtctctaatatttgcatcataaatactgctaaagatgctaactgcatcaagagaagagccctatgacatttccctagcaacttctttccagatggcatggtactattagtgtgtagttgtgtagtctctgagttgggttgtttagcctgttatgaacccgttgatttgttaagtatcgataaaagcaaactcaagagaatagcattaaaaaaatattttttttcatttttgcagaaatcaggacacggtagtacctcctcttagtctaatgagtcactgaggttagtttgaagtattttatctttggaaaaactatcccagtttttttgtgtgtatgttcactaaaaggaaagtttgctgtattttaaaatacaaagactgagtcatagtaggtaaaataacttcagtcagtaataagcttcagcttaaaacatttttcttcttcaaatcagaaattcttagacagtgattctcattctggagcagttttgctccccaggggacacttcacagtgtttggagacatattttggttgtcagaacttgggagggaggagggtgccactggcatctagtgggtagagatggggatgcatgaaacataatgcataggatgatactgttcaacaaagaatgaacccagccaaaaatcatagtgctgaggttgagaaaccttacattaatgccttaaagtcttctttcttgcagtgactactattaattctatttaaaatgggtgtaaagaagaagaaagaaatgcaagttgctgcgctgaccatttgccatcaggaccttgaaactttgaaatgtaggtgacttctggtttcccttattatatttttttctagtttgcaagcagagtattttaatgactgggacccctagcatataatattcaaattctttatatttttccttatgttttggatgtaaaacaattttcttaaaattctgtcttcagactatgttccacctattgctatggtttataattaaaaaattttgtagaatgcacaacaaaggcaaagttaactcactgttaaatcattgaaaatttttttttgtatatgttatatagcttttgctgatgtggaagggaaaaatctagcttctttgctgttacattgtgtgcaactcacggatggagtgtcacaaatccattatattaaacaggtaagtctgaattgatattcatggatgcatctttaagagtatcatgctattaaggatttaaaaaaaatcactgacagtttttggtccctaattattgcatatcagtttatcattagcaaataagtatttttttttttctgtttattgtataatatccttgtattcaaagcagcaatagaagccatattcagacttctatcataattgaactgtaaacagataaggtagaagataatgtgcatacctcttttgtggagataaattttaaaatatatgaatcttcaaaactttttagcagacacatttaaaagttaatttaaaatataaagattatacttattagtatttcagtattaggatttaccatttgagcacacatagtttttttttttggaaagcaagtaaatgtattactggttttttaatagtgctacagctgttctttactgtaagccattaacaggtctgtgattctctgtggaggtgggtctggagggtaaagagggaggtggggacatgagtttaaaaagttaataaatagtgaaataggtgtttaaatcagtatccttgacagtggagtatggaaaacatttcacgtaattgacactttgttttatttatttttttgagatagggtctcactctcttacccaggctggagtgcactggtgtgatcttggctcaaccacagcctcaacctcctgggctcaagcaatcctcctgcctcagccccctgagtagctgggactacaggcatgtgccaccatgcctggctaatttttgtatttttttgtagagacagggtttcaccatgttgcccgagcttgtctcgaactctcctgggctcaagcgatctgcccacctcagcctcccaaagtgttgggattacaggggtgagccactgtacccagcaattgagacttcaaagagtatctgtaaccatgttactttgctatatttgatattataaaaattacttcaatgttttgtattatagattgtgcctctgctggagaaagcagataaaaatggcatgtgtgatcccactattcaaagttgtttggatatcttagcaggcatttatctttctttgagtctaaagaatcccttgaagaaagtattggcaaggtaagaaaaaaaggaagggaagttgggtgttataaatgttgaatttgaccaaaagtaactgaagttccttccttggtttgataaaactgaactgatacagatcacaaaaagttcattcatatggtttgttctctgtttcattgattagttacaactattttttttttttttttttttttgagacggagtctagctctgtcgcccaggctggagtgcagtggtgcgatcttggctcactgtcagctctgcctcccgggttcacgccattctcctgcctcagccaccacacccggctaattttttgtgtttttagtagagatgtggtttcaccatgatagccaggatggtcttgatctcctgaccttgtgatccgccttctcagcctcccaaagtgatgggattacaggtgtgagccactgcgcccagcctagttacaactttttaaaagtataaaaagccttcttaggtcacatgcttaataaacaggctgtgggctgtagtttgcttactcctgcctcaatccatttacatttattggttatgtttaaatgtcatcttgctgttttttcctctttttgtcctatctgttcttggtttaaatatatatttacacagataacacaggaatataggcttggtataaaaatttcaaatgatatagaactatacaaaataaaaactaaggcttccatttcattgtttagggcttatcttacttttcttagtaaagattgtcacttaccgttttggtatttatctttctagaccttctctttgaggtcagcatatgtgtgttacattctactttttttatatatatctgtaaacgagattatactctacagaatgctctgtagcttgttttttcactaaagaatgtcttagagatatttccatgtcataaaatcctaattgtagtaaaagacatataacataaaaactcagtcttaaccttttttttttatgaattctttttttttaaattttaattttcatttcgataggtttttgggcaacaggtggtacttggttacatgaataagtggtggtttctgagattttggtgcacacatcacctgagcagtgtatactgtacccaacaatttgtagtcttttatttctcacccccttcccaccctttcccctgagtctccaaaggccattgtatcattcttatgcctttgcatcctcatagataagcttccacttatgagtgagaacatatgatgtttgagtcttaaccatttttaagtgtacatagttcgctattgttaagtgtattcatattgcagtgcaatgatctctagaaccttgtcatctgctaagctctgaaactgtatacattaagtaacaactctccatttcctgctcagcccttggcagccactttccgttcataaatttgattactttagatacctcatattagtgtaatatttgtatttatatttttgtgactgacttatttcacttaacataatgtccttaaggttcatccctgttatagcatatgacaggattttcttctcttataaggcttaatattctgttgtatgcatatactgcatttttttcatccatgcatctttcaatggacatttgggttgcttccactgcttgcctgttgtgaataatgctgctatgaacatgggtgtgcaaatatctatttgagatcctgctttcagttctttggatatatacccagaagtgggattgctggaccatatggtaatactatttgtaattttttgagcaactgtcatactgttttccatatgcaacattttacattcccaccagcagtccttactttttcagctataaatattctgtaatatgaatataccaaaatttaaatgtaccatatatatgacatgtatgtatctatatatggtacatattacatgatttatattacatggtataaagtaatttaatcacttccccattgcagtgatattcttatgtatataattatatatgtgtatttctctgagataaattccaagaagtggaatttctggaccaaaaattaggcctattgaaattcttggtagatattgttaaattgtactcccccagactacccattgaattagaatgcttgtttcttcttcatatatttccaacattggatactatcaatctttaaatcttttaaaatctaatgaaggaaaatgctatcattataatttgtgtatcccagattactagtgtaattgaacattttttaatgtgtggaatttgactttttttattacatattctttgtacattttcttgttagaatgttttcttgatttataagacttctctatagatcatatgccaaatacattcctttgttacttgtctttaactttctcatggtgtcttgtctttacaaaaattaaaatattattttggttatcaattcagctaatttttgtgtatgtagatttctgagttttataccttgctatatgtgctttctgtaatacaagattatttaaaacattatttgcaggccttatactattttttttttttttgctcaacttttatgtccatctggaattaagctttgaatgtagtgtgaggtagggattcaatttagttttcttttttatatggggaaccacttacccaaactgttgaatcgtccatctttgcccacatatttggaatgccaccttattgtgttatatgttcacatatatacatgggtttgatttctgagttaggtccaattattcatacaccaacaccacacttttatttactatagtttgataaagtgttttaattatatgtcagtgttaagtcatccctctagtgactcttcttattctgaatattcccatttttgaattattttcttccagaaaaactttgaactgtccagttatatttaaaacaaagccaatcagttttgatgtatataaattgaggcaaaattgatatgtttaatttactcatttgataaatttttattgactgcctactgtgtttcagcactcttctaggaactgggggtagaatgaatgaaacagtccagaatggaggttacattctaaggggaagatagaaaatagacaaaataaataagtaacatttataggatattagatggcatgagtgctatctaaaagcgggaaggaaggaaaggggacataaaggatggggtgagggttacaatttaaaatattatggtcacttcatatagctttgctcagacatgataaggtaattgagattgacctgaaagggatgaggcagtgattgctgggtatatttgaaggaagagtattttggatggaggaaacagcagaagcaaagactggtatgtcagaacagagcaaggccatgtagctagagctaagtgaacaaagatcaagatgaggtcaggattgtgatagatgccattttaaaaatcaagaaaagaaaaaaaataaataaagatgaggtcaggagctaatggtagtgccagattgtatcgggaggaccttgtaggtcactgtaaacacttcaactagtactttaaccgagaaggatattgttggaggttttagtaagagaagtgacatggtgttttaacggtgtcactctgcctgttctgttgagaataatctgggagatgggagagaagcaaggtggaagcagggagaccagatgtgctgacaagccaggaaattcgagtgatggtagtgtgtagttgtagttttctggctgtattttgaagatttagttcagtattcccacatttgtatgattctcttccctctccacatattctggggctattagattgtcagatttttaatatttgtttctttttctagctcactaaatagcctgcctgatttttttctacctgaggctatgcaccgttttacttctcgtcttcaggaagaattgaatactactgacttatactcttacaggaaagttactgacaatatttcttcctgtatggagaactttaacttgggtaaggctgcacttttctagtcctttttctggctaacccctctcatcacatcatagtttttaaatgacattgattttggtcgtgaaactccttaccagtgttcattttttcctctacaggtagagcaagtgttaataatctgcttaaaaatggtaagtcctattattttattttgttccatgagttgatggcttgtatgagtcattttggaactggctcttttaagtttcttggtaataggtagagcattgtagataacttaggtacatcatgacccttccttttaaatttttgtttccatatcatgatatcattttggataacagtgatataaaatattttattttattgaaattgagcttcacagttttaaattcttatttgtcatattctttttgtttcagtgcttcattttctgcagaagagtttaattgaaatcctggaagaaaataggcaagtgctatatgttggcatttgtgtgtgcacacttgcagttgtacattatctttgtacaaagaaaaatttaaaagtctcagaatgtgatcttttcatcccttttcattaatattatcacttttatattttttttgagatggggtcttgctgtgtcacccaggctgtagtgcagtggtgtgatcatagctcgctgcagcctcaacctcctgggctcaagtgtttgtatcacctcagcttcccacgtagctgggactacaggcatgcaccaccacacccagatagttttttttatttttttggagacagagtctcactatgttgcccaggctggtcttaaactactggactgaagtaatgtgcccgctttagcctcccgaagtgttgagattacaggcgttagtcactatgcccagcccctttctccattaatattagacccaattatttaaaattttttttagaggtttgatatttaattttaataaattcaaagtttttatatttgaactttattaaaatatttaaatgaaaaattaaaaatttaataaattgttatgagaataagtgaaagaactcttttcctcacctgagtgtgttcctttttcatagcatcctgttttattttgtgagtgaaatatcctctgttacttctctgaggatatattcatgatagtttttttgttttttatcatctttacatagtctttgtttcttccaagttgcttttttctgtttgctggttttgttcagtatatttcttattagaagctttcctcagaagtctggtgatccttggctgggcaattatgtatttctttctatctatctatctatctatctatctatctatctatctatctatctacatttttttttctttgtgacagggtctcattctgttacccaggcttgagtacagtggtacaatcttggctcactgcacctctacctccctgggttcaagtgatactcccacctcagtctcccaagtagctgggactacaggtgcccgccaccatgcttggctaattttttttttttttttttttttgtaggaatgaggtctcactataatgcccaggctagtcttgaactcattggctcaagtgatcctccctccttggctcccaaagtgctaggattataggtgtgagccactgtgcccagccagggtagtcatgtttaataacgggacaccaaggattgatttgaatgtctgcgcctattgagtggagttgactgcaggttttattgtaggctagtctagctgagctctttcttggggtaactcttccttggggaaacctaaagatgtcagtacgtttaaatctttttgcttaggtactggatttgccacggaagactcttccaaaccattgtcttaatattctggttgctgagtgagggaagaaggctgaggtctcagtatttggcgtgcactgtgcatgtatttacctaattctcctttttgtaatatgttgctgccttatctgtgtgtgctatcttcctttccaaacacctgttttaccttttctaaagataaacaagttgtctgctggctcggaggtattcagtcttcctgtcttcaatcctttatttacctccacatcaaggagtacctagtgccaacagtttctgagccatttgggactacaaatcaaatggcttctgggcttgttccctggcttagtatccacttttcttgattctgctgtcagttatcactcatccatctgctttgcagcttctgaaatactattgttattgtcttgttgcatattggttgcctttaagaatttatctttttacgttttcaatcccatggctgttggtttgaggaggttctgggagagaggagaaataatacctgtacatcttctttcactcagggtagcctttttccacagcaggagctctttgtctctttttctcctttttggctcttctttttatgctcatcgtgtaaaggtgggttctgtcctttttattttgttcgtttgaactgcttaataatgtccactttggtgtcagccaccacctatgtactcaggattcccaaatttattactccaagttagatctctttcctgagtggtagactgatggacatcagttgacagttaacttgtggacatctcagcttggatgttttacaggtacctcaaattcagggcgtccaaaagaaaggaaaatttatttttttaaaaaagtcttttcctgtagccccaggtaacctctattctacttcctgtctttttgaatttgcctattctaggtgattcttatgaatcatgtaggatttgtccttttgtgtcaggcttatttcatttatttttccttttttttttttttttttttttaattgagacaagctctggctctgtcacccaagctggagtgcaggattttggctcactgcaatctctgcctcccaagcccaagtgatccttccacctcagcctctggagtagctgggcccacagacgtccgccactatgccctgttttttatatttttggtagaaatatggttttaccgtgttgccctggctggtttcaaactcttaagcgcaagcagtccccctgccccagtcccccaaagtgctgggattacaggcgtgttttcgagggtcttccacgtttgtagcatatatcagaatttcattcctttttgtggccgaataatatcccattgtatgtttagaccacatgttaatcaatctgtcgatggacaatttgatctgtttctacctttaggctattgtgaataatgctgctataaacattgatatacaagtatatctttgagtctctgcttttagctcttttgggtatatacgtaggagtggaatcataagataattctatatttaactttttgaggaactaccaagttgtttttcctaacttttgccttaataggattattctgtgttttgctgtgttgagaactgagaggtaaggacagaagctgcgagagaccagttaggaggctatggcaataacccaagggagagatgagagtggctcaggccaagatgtagcagtggagttggtctgattctagatgtattttgaaggtagaaccaacaggattttcttatagatgagatggagaggagaggtggcaaggatgattacaatgtttttgtaggataaagatgcagcaggtacagcagatttggagttgaagataagttcactcatttagagatgtctgttagacatccaagtaaaaatatcaggaagttagatataccagaaaggaattagacagagaggtctgggttagagataaaaatttgggaattatcagcatgtagattataatttaaagctgatgagctaaaagagatcagcaaaggagagaattagatggagaaaagaagaggaataaagactgagtcctggacattcctaacataaaaagatcagggagaagaggatgaattagtgaaggtatccgagaaggagtgctggtgaagtaggggaaaatctgcgagagcctggcattttagaagtcagggagaggctgggcatggttgttcacgcctgtaatctcagcactttgggagggcgaggcaggtggatcacttgaggtcaggagtttgagaccagcctggccaacatggtgaaacccctgtctctactaaaaatataaaaatcagctgggcatgatggcttgcttgtaatcccagctacttgggaggatgaggcaggagaatcgcttgaacccgggaggtggaggttgcagtgagcccagattgcaccactgcactccagcctgggtgacagagggggagactctgtctcaaaaaaaaaaaaaaaaccagggagggaaaatatttcaatgttgagagagtgttcaagtttgtaagttatgtcatttttttttttttttaagatggtgtcttgctctctcacccaggctggagtgcagtagtgccatctcggctcactgcagcctccacctctggggttcaagcgattctcctgcctcagccccctgagtagctgggattacgggcatgtgccaccacacctggctaatttttgtatttttactagagacatggtttcgccatgttggccaagctggtcccaaactccagacctcaaatgatctacctgtctcggcctaccaaagtgctgggattacaagtgtgagccacttcgcccagactgagttctgtcattcattcttgatttcttatctttgccctaaaagaagtgaagttagttattggctgagaaagagggacatgtagattaagttaacagtgttgaaagtttgcaattaatgtctacataattggaatgtttataggaatggaagagagaggaataaattatcataatttaaaattgattttgggcctttgaggaatgtatttattttgctgataattagaaatgttcacacttttgtttgaatttccttttgtaataatgtcttttcttctttatagaaaatgtgctggaaatcatattattcaaacacagttgatgaatgacttactggtaggcattagagtttcaatgatgttagtacagaaagtacaagatttccagggaaatctttggaagacttccgattctcccatatggcaaaatatgtgtggattgctgagtatttttaccaaggttttaagcgatggtaagtgtaacaaattatatacaaatgatatataattgacagttaaaattgagtgtcaatcagcttttcctactaatagtgtgaaatgtgatacttaactgagatgtggaatgtgtccttactcagcctctcaaaaatggagggaggccctggactacatggttttttttttttttcttttctttttttttttttttgagaccgaatctcactgtgctgcccaggctggagtgtagtggcgtgatgtttattcactgcaacctctgcatgttgggtttcacatcccaggttcaagcgattctcgtgcctccgcttctgagtagctgggattataggagggtaccaccacacctgactaattttttgtatttttaatagagaaagggttttgccatgttggccaggctgttctggaactcctggcctcaagtaacctgcttaccgtggcctcccaaggtgctgggattacaggtgtgagccactgtgcccagcctgggtgactgagttctatttcttgccttggaagataggttcaagggtgatcactttttaataatttattaagctgtaaatttgttttctgtcacttttttggaatctgtggtttattattataataagattaacgaaaaagtgacacctaacacaagtatttatataaaaagttgaattatcctttctctcttcacctcccattctatatggtaatatatgtttgaatgtaacttaattaaaaacatgctaatgggatctctttagagctcttgttagtgaaaaacaataactgactctggttttgctaggctgattggaagacaatagcatctcattgtttgtgttttttggtttttttttttgtctgagatggagtctctctttgtcgcccacactggagtgcagtggcgtgatcttggctcactgcaacctctgcctcccagattcaagcgattttcttgcctcagcctcccgagtagctgggattacaggcatgcaccaccacgcctggctaattttttttttgtatttttaatatagacgggctttcaccatgttggccaggctggtctggaactcctgacctcaggtgatctgcccgccttggcctcccaaagtggctcaggtgtgagccaccgcgcctggcctcattgtttgtgtttttaaccctggtaatgaaagtcttagctatattttgtccaattagtatttctatttctctttttgcctgggttctcaggtattaaaaggaaaggaaagtagttaaagttacttttattaagacataacttacagaaaacttttcagaggttatttactttttaaaagaggactgtgttagtctaaaaaaaagattctctaactaatgaaatgtagagaatacatgattttaatatgaggtaacttcggccgggtgtggtggctcatgcctgtaatcccagcactttgggaggccaaggcgggcagatcacgaggtcaggagattgagaccattctggccaacatgatgaaatcctgtctaaaatactaaaaaactaaaatacaaaaaaaaacattagctgggcgtggtggcgtgcacctgtagttccagctactcgggaggctgaggcaggggaatcagttgaacccgggagacagaggttgcagtgagccaagatcatgccactgcactccagcctggcaacagagcaagcctccgtctcaaaaaaaaaaaaaaaaaaagaagtagctttttttccgaaaagttgatggcacctaatcagtactattcttttccagcattttaaagcttcataatcagtaaagtgtttagctgcaagtaactgaaaaccaaacctcctttcccacataacaagttcagaggcaggtcatccagaactggtataggcagtgtacgacccacacattttctgcttttctgctgtgccatcttcagcaggttggttttcacccacgtttgttgcctcgtggttgccatatgactgctgtagctccagatgtgtctttattcaaggcaggaagaaggaaggccagttgcgtctttacttttgatcaggatactcaagtgactggcttaaatccaactggcctgaaccctcttatatgcctacctttagttgcaaagaagattgaagaagcaagtatcctgcttttggctgggcatgtggcttccccaatcaaagtcacagttttcttatcagtgatgaagggcagagtggatatttagtacgtagtttatgatgtcataaagaagtgttacttctttccccaggttgaacaactcaccatggtattagaggctaatagagataaaacaaaaagaagataccaagtcaaaactgtttggttgctatgggtacagtgtcagtgctagcaaagtttgtaattagcacttacctacattctttatacaagccctgaaatctctttttgaaaaagtctgtgtatatggtgattgggatacagaggcattggtggaggggaggggacaggtggtgttgctgttaggtgttttgggaagcaatagttggcgaggaagaaagtgtatgttagaggagagaggaaggaatcacgtttattgagtatctatatgctgggcttaaaagcctttatattcagccgggcacagtggctcatgcctgtaatcccaacactttgggaggccgaggcaggcggatcacaaggtcaagagatcgagaccatcatggccaacgtggtgaaaccccatctctactaaagatacaaaaattagctgggtgtggtggcacgcgcctgtagtcccagctacttgggaggctgaggcaggagaatcgcctgaacccaggaagtagaggttgcagtgagctgaggtcacgctactacactccagcctgtcaacagagtgagactccttctaaaaagcgtttatgttcattattcatctaaacctgacactgcctcagttaagagttatcccattttacccaagagaaaagagagtctgtgggatgttaaataacttaggtaagacctattcacccaggaagtggtcagactagaaattgtacccaggcctatctggctgctcagcatctgctctttccactctaccagaatattcattatttaacacaagcttctctccttttttgccaaatagatgatctgttacagactgtacagagcacatctggattagctattattctttttattaagactatgtttcacccgtctgaaaagattcctcatttggtaagtgcatctcctttttagaattgtactttattgagagttagggtatgtttaaaaaataattttggcttggtgcagtggctcacacttataatcccaacactttgggaggccagggcaggagggtcacttgaggccaggagtttgagattagcctggggagtttagctagaccttgtctctacaaaaaaaaaaaaagaaaatttgctgggtatggtggtgcacagctgtagtcccagctctttgagaggttgaggtaggaggatcgcttgagcctaggagtttaaggctgcagtgagataagattgcaccagtctgggcaacagagtgagaccttgtctcttaaaaaaaaaaaaaattaaaaatatttttaaagaagtgaattaaaataatttttttttgcattgtctggttccttctgatgacctttttctgttataataagagacaattccaaaaattcagataaagcaacaataacaaaaagacaataacagtcacctgtaagtccatctcacaaagataatcactataaacatttttgatgtacattcttttagtttctttttagtgctgtttgttcagtgtcatctctcattagtatcttaaaagatatttttaatgttaaaattatgcatatcaatgtatagatatatacacagtaataacttttctgataaatgtattctttattgagaataacccaaatcatgtgctttagacaggaagcatgctagatagagtcaattgttcagtaaatttgcttcttacagaaagtataatttgataatttaggccacaatccttgtattttttactagtagatttctttttttgcttgctatattgtatggaaacttattttatctttttacctgaccttagaaaaatatattatgagatcacacaaagtaattatctttggataagtcgaagatgtttatttctcaaatcacctctaaaagcatttgtttaaaaaaaaaatacataccaaaaaaaaaaagcagttgttaagcttatccacctgcaggtggcgatgtgttgtgctctgccagtacattccaaccagcaaaatcattctcgtacttgatgtaatttttttcctttaatactaatacaataatcatgacatttgtgggtattttatctttggatttagtcatttttcctaggatttttcaggggaaagagatgtttgggtttgtattttgaaatatctctgaaaagttttaaaagctttatgtgtgttagctctgctatatttttccagattagcagtgtgctgcttcgttcagtggactgcaccagtgtccccgagtggtttatgagcagctgcaggagcctctgttgtggtgacatctctcagtcagctgtcttattcctctgtcaggggacacttgccatgttggactggcagaacggaagcatgggtcggagtggggaggccctgctcttggatactgcacatgttttgttcaccttgagttcacagtgagttttgatgctatcgtctcatattttgtttcacttgtaagacatttagaagatgcagtccaaaagctggagtggcttgtgcctctaatcccagctaccctcccagtaggctgaggcaagaggatcacttgaggccaggagttcaaaaccagccttggtgacatagtgagactgtgtctgtacaaaacttttaaaacttagctgggtgtggtggcatgcgcctgtagtctcagctacgtgggaggctgaggtgagaacattgcttgagcccaggaggccgaggatgcagtgagatatgattgtgccactgcactcaagcctgggcgacagagtgagatcctgtcttaaaaaaataaataaataaaattattgctgcaggttagcctgtaaagaacatttctaaaattaatttttaacattttcaatgttatcgtttttaaaaactataaaaatttttatatgtatagtgttttagaatttataaagaacttcaacataggtaatctaatgtgatcctcaaatggctactatataggataagaaatctaatttgttgaatgggcaaagggaggcttagaaaagtaaatgcttacctgagaccatattgctaataagaacctgaaacagcaatcttagaaggtcttctgacttcatggggctgtattttgtatttttgtggtgtttttgccataatggctgaaagtgatcatgtatatgaaatgtcgaaacatatatacagcttgataatactgaacatatgaataaaggaggaaaactaaaataattttttacatatttgagctatattatgcaattcataaatttgaagtgtacaattcagtttattagtttattcacagagttgtacaaccaccagcatttctaaaattaatttttaatattctctttgctatattttttctttaaaaatttttttcctgaaatttgtttttagcatcattttttaaaactataaaagtttctacatgtgtagtgctttagaatttatgaagcactttaacataggtaatctaaagtgatccttatcaacatttctgaaatgaagttttaacatcttaaaagttaattcaaacaactttagaatatttttatcacagagaagccccattcccccaaccatctccaacacttggctttccttatcttttaaattacatgtgtaggccgggcatggtggctcaagcctgtaatcccaggcttgcagatctcaggcaggtggatcacttgaggtcaggagttcaagaccagcctggtcaacatggtgaaaccctgtctctactaaaaatacaaaaaattatctaggcatgggggcatgcgcctgtaatcccagctactgaggcggctgaggcaggagaatcgcttgaacctgggaggcaggggttgcagtgagccgagatcgcaccactgcactccagcctgggtgacagcaagaccctgtctcaaataaataaataaataaataacttgtgtaatcatcacagtcaaggtagtgaatatttccatcatcccccaaatttccctatgtcccttcctggactattattatttttgagacaaagtctcgctttgtcacccaggctggagtgtagtggcatgagcacagctcattgcagtctcactcctgagctcaagcaatcctcccacctcagcttcccaagtagctgggactgtaggtgtgtgtcaccacacccagctaaatttttaaattttttatagagatggggtttcactatattgcctaggctgatcttgaactgctttctggattattttttacaaggtaaaaagaatcatatacaaatttgagatctgttttggctttacttgtagttttttgttcttgtaaatttaataattgaaatttgtggtcattctgtgtatttaatatttttaaagtctaaattgttataaaatgaaatttcttttactaatcagtttacaataatggctcatggctcatttttcttcaggattaaagagccaacgctggaaatgtttctgtctagaatcttagcatcctggactaattcagccatacaagtccttgaatcaagttccccgagcctaacggacagcctgaatgggaattcaagtatagttgggagacttttggaatatgtctatacccattgggaacatccattggatgctctgagacaccaaaccaaaatcatgttcaaaaaccttctccaaatgcaccggctcactgtggaaggtgcagatttcgtccctgatcctttctttgtggaattgactgagagtcttttacgattggaatggcatattaaaggaaagtacacgtgccttggttgtttggtagagtgcataggagttgaacatattttggctatagataaaactattccatctcaaatcttagaggtgatgggagaccagtcattggtaccttatgcaagtgacctcttggaaaccatgtttagaaatcataagagtcatttgaaatcccagactgctgagagttcttggattgaccagtggcatgagacttgggtttctcctctcctttttatattgtgtgaaggaaacttggatcaaaaatcttacgtgattgattattacttgccaaaattattaagttacagccctgaaagcttacagtacatggtaaagattcttcagacttctattgatgctaaaactggtaagaaaaatgcatttttgttttagtagtttctaattatgatgcttaaatgtaggtagctatgcagatactaatcatattcaaatttaaatatcacttctataaatagtaaaggaagagattaatgatagatgtttcagtttgaaacgaatgttcctatatatagctgaatggagttttttggctgaagtcatttctacaagctaaagaataattccacttaaaatgataaactttcctgtattacaaggttttaattcattttttcaagttctgaatttattttattgtatcactgaaataaaagtttgtgtgtcttatataatgtgcttattcaagtcattgagacaataattaaaaattgtgttaggcaaggttaaagacaggtaacttggcagtagcaagtttttttctctggggaagtgacaaaattcagaggcatgatctcaagaaatagccatctatagttatttagaataggggtaaacatcccattgaaactcacaaaccctacaggaatcactgcattcaagcataattcaggatgtgtaaagtgatgatcatgacacatcatataaatcttaaaattattacattctgtttaacaaagcaagaatgtagtatcgtacagcataattttaagaaatattttcaactaaaattgttaaaaacgttcagtacttcaaagagtaaccatgaggtagcaggaaaatttgattcctgtatgcaaaaataagccattatttgtaatttttgacaacacttgttcttgagtttttgaaaagccatctgaaattcaggattcaagaatctgttctgaagtaaggttgtctttatttttatatcaagctgccctgtcttcttggtaatggctgacgtcctagcctctgaaaccagcaggctctttgtgttccttttttaatctttactagtgagaaacagccactctaaaatatgcagagaggttcagtgtttacttttagagaagtaatagtctgtagccactgatgtgcttatttctccacctgattttatttcctgatttgctgcctgattccctttctaggtgttagggaaaaagcaaaaatgttagcaggtaaataatgatttgtttatgttaacgataagagaattatgcttacttgaaatgattgacaaaagggcaaatcatattaaataatgattattttagaataggaactttaatttgtgttagaaatgagtttaaaatgtgatttttatttattgaaataaaatgttaattggaaacatgaaaattagcagctgataattatagtagtcattgcataatacagtaatggtctttgttattgtgctttcaggacaagagcaatctttcccatccttagggtcttgtaatagcaggggggctctgggagctttgatggcatgtctgcgaatagctagagctcatggacatcttcagtctgcaactgatacctgggagaacctcgtgtctgatgcaagaataaagcaaggcttaattcatcagcattgccaagtaagtaaagaaaattacctggatttgtacatgcagtagatccctttcatgtagcagttcaatatagaggcccctacattgtatcctgaactgttttagggagttcataaagagaatgagtagaaaccctagtctcccaactaaactttcagtaggccctttcttcaagctactgaaagtttagttgaggatgtaagaaaacttacataaaacaactggaaactcttagaactgacaatacagatacaagcatgccatcatgtgcccttaaatacataaggactcgcttggaaggctcagaagagactgatcagagcaggtggtgcttgattaggaaagtgatagatatgattagaaaagaggaagccttggagcagcatacaaaatggagggacccaaatgagcaaggtctggaggatgattaagaacattgcttatcaggggtggagtgttttggacattttttggaaaggcctaatgctaggctaaagacttagttggttcccaggcaccagctggttttactaagctaaaccaaagctactctgttttcagcaaggagttacattagtggaaacgtgagtttccagagtgggagcagaaagaaaccaggaaaccagttagaagtgtctggcagtaatttaagagtgaggtgatggggtaaaaggggtcactggaaaaaaagaaaaaggaatgaagctgagcattaccacggaataaaaatctttaagattgttgcattttataaatccccaatttacatgtttaataaaagaattgtataggaaataaccctaggatctttgagattaggaaacctttctgaggtacctattggtgaactgaagtttacttttttccttttgtagcctatgtaagtaagcaattcaagtgatttaggctttgcttatttcttggaaaattaacattttattgcttgatgttttttaggtaaggatagatacattaggcttgctttgtgaaagtaatcggagcacagaaattgtttccatggaagaaatgcagtggattcagttctttattacatacaatcttaacagccagtctccaggagtgcggcaacagatctgttctcttcttaaaaaggtagaatttcccatcagaaggcatagggaagtggtgaactttgtttgggaaatcgtttttaaaaagagcccagattttgggagcgtgtgggaatggtcatggaattgggctaccacatctgttcatgacggccgttctgtgacctgttctctcattccataaagcttacatttgggattaaaatccagagtgaaaagcacgcacccctccccccaccattttttttcaggagttcagaatcagcctgggcaacacagtcaaaccccatctctactaaaatacaaaaaaattagccggttgtggcagtgtgtgcctgtagtcctagctatttgggaggctgaagcaggagaattgcttgaacctaggagcggaggttgcagtgagccgagattgtaccactgcactccagcctgggcaacagagtgagactcggtctccaaaaaaaaaaaaaaaaaaatagtcttgctctgtcagccaggctggagtgcagtggtgtgatcatagctcactgtaccctcaacctcccaggctcaagcgattcttcctccccagcctctgaagtagctgggatgacaggggcacaccaccatgcctgactaatatttaatttttttttagagatagtgtcttgctctgttacccaggctggtcttaaactcctggactctagtggtcctgccacctcagcctcccaaagtgttgtggttacaggcatgagccaccacacatggccaaaaggcctttcattttggtgtagtaaatcaaccttgggctcttttttgtaaagaaaaagtctaatgctggagttaaggtagttttaagaaaacttggtaacagcatttttatagtttaagcacctcaaaagatcattatcaaataatctaacttgaattaattgcacacacatttatggggtgaagaattggtaaagtagggaaatgactaaatcatcttcaggtttgtgccaacttaaaggaaacagaattgtggtttaatgacagtattctgctttgcagtaatagtttgtttttggtataaaaattattttctgtcaaaaagaaacattataaaatattaagagcttaaaaatctgtactcttcttgcctgaagttttattctaaataatttgcctctcaggctgacatttaaatttaatgtgtggctcacctgtgcttcatttcctttgtttcaaaagttgttttgtaggatacaggaaagttctcaggtactttataaattggagcagagtaaatccaaacgtgaaccagagaatgagttaaccaaacagcacccttctgtttctttacagcagtataaggtaggtgatatatttctaaacatgagagtttttttttaaattaaaaagtattatgaataagcattaaagggaaataaatggaagtctcttggtaaattgtgtttctgtgtttttttccttcaagctgagtattacctatttctggtgctttggtactctacttgatgtagcctgggttatggaaccagtgctgtaccggaggactgttacagaatgacgttagtgggctaacctcaatcactttcagcttatgtgggcgagatgaatttagtacttttaacagaagggtaattgacagtactgaactctgtccctctccagggcagaagactgctgttgctgggcctgttttctctttagtttgagatgacttacagaggcttgatattaatgactcttggcccatggtccagctgtggagggagcttgctgtctgtgtcacattggagtgagcttgaagagtagggctggattttagggcattgtgttaatgaaatggatggaaacctgggtgcagcagctccagtctgggccagggcttagcttgacaatcttgaatttcttttcagcagaacagattgagcttttcactgttcttcccccaaatctagcctttgagaagcagacccttttttgctcctcaggcccagacagaagacagcttacctatttattttaagaaagaggtagattaatagattaatgatacgtttgaactatgacatgctcactacttactctaaacattattatggatgcccttggttttcaattttgtatttaaaagataaaaagccatcaaacaaagagtatttatatacaaagggtaaaattagcttcgaccttttaaaatctcaatgacgaagattgggacgtcacaacctgaactttaaagacatgggtttactcctgattctgccacttattagttggctgacttgagtctcgtcaactataagcagaattagtaacctttctcaaagattgatttgaggattaaatgaaaaagctctttgtagactatatatctctccacttgatcttagctaaaaggccgagaagtgatgtaaactatatatctctctacaaagccttgctgggagtcattaaaagcgactagtggtggctcatgcctataatctcagcactttgggaggttgaggcaggaggatcacttgagtccaggacttcaagactagcctgggcaacatagcaagaccccatctctattaaaagaaaaaggcaaccctgagacgggcgtggtggtgtgcacctgtgttcccagatactctggaggcttagggttgaaggttgctggagtctgggaggtgagggctgtggtgagccttaattgtagcactgcactccatcctgagcaacagagcagcgagaccctgcttcaaaaaaattaataaataaaaattttaaaagtgactagaatatatattgaagcccccagtgtgtgtgtaggatagttaaaaaaattttttttaattaattaattctttgtagatgtaggttcttgctgtgttacccaggctggtttcaaaatcctggcctcaaatgattccccccactccacctcccaaagtgctgggattacaggcatgacatactacctattctaaacattattatggatcattgtggatattatgcccagcctagttattttgtagtttctcttagatcattggtagatttaacaatgcatatctcgtttgctttctttttgcaaggggtaaaatgacatttgtgaaaactcaggtacttggaaacacaaaagctgttttttggattgagattgtgaattttcatgtatgcatggtttcttggtctgtgttataggtatgcatgttttgaaaactagtcctttgagtcttaatctgagtcagtctcatggttgtggtactttttccctactggtacacctgtggcttttagaggttgtgaccttggcactatattgttataatcgtcacaccatcataagagtgggtgccatgcacagggtgtggtaggctcacaatcaatagactaagtgctgggggagaagaggaggctattagttgaaaaagacatcttctaggctagtggagattattttatacctaaataactgatattagtaactagagtacttttaaatttataaaatattagatgtccatgttctcatttaacctttaataaaaaggctgtgagataacattcttatccccacttaacaagtgagaaagctgaagctcagtgaagttcaataacctgtgtaaggttcctcagctagtaagtggtagagtcagaactccaatccagacctgctcttgactccaaaatctcagtattttctcccccccacccccagtagtagcttaatgaaggcttggagataagaaagtacagggagaactcagggaatggtgaattcactgatgtgaatgacataaaataccttggggaatggaggacttgagtaatgggaagtgaatccaaagaatcaagttgaaaatggatagctttcagtgataggccaacggatttggaagcttcactgggaaccattaaaagtgattagagcatatactgagcattactatgtatgtaggatagtgtgctcagcactagggatccaaccatagaaatgtggtccctgcatatattgtggctacagtctgattgcaggaaacaagaactatattaaaccatataaatgacaatacggtttgaatgatacttcttagtggatgatcttgttttttttcagagggagtttcgctctttcgcccaggccagactgcagtggcgtgatcttggctcactgcaacctctgcctcctgggttcaagcaattctcctgcctcagcctcccgagtagctgggactacaggcctctgccaccacacctggctaatttttgtatttttagtagagacagggtttcatgttggacatgctggtctcgaacttctgacctcaggtgatctgcccacctcggcctcccaaagtgctgggattacaggcatgagccaccacgcctggcccttgttgtgttttaatgtgaatcctgttttacttataattaaaagtagcttaactaggatatttttcagtaatggccctatttctttgaaaccgaatagaattaataacctaataaactcttagggcttgtgggacctaaaggataattccccagggttgcatgtccttcacctgagaaatgaatgcagggatctttggtagagtcagttaagactagggctgttgaacccagcgagactctgtcttaaaaaaaaaaaaaaagtgtacgtatctgtctgggctacaatagaaattgtacttcttgttgactctgcaaatatagggtttattaaagtcataatatagcttatggtcaagggtgctaacctgaattattaagcaaagtgaacaaccagtatcattttttgaaatgttttatttttaaattgaaaacaaaaacacccactcttaaagggtgtttaatactctgaatataacctattgtgacgtaattatacttactgtaattttttttttttttttaagaatttcatgtcatccatttgtaacagtctttttgaagcattgtttcctggatcttcctactcgactagattttcagctttaaccattttaggttcaatagctgaagtttttcatgtcccagaaggtaagtgtttaataatgttaggggaagtaatttttgttttctttcaaaacatacttattctacattttgctttatttgaagtttcagttttgttgcctttctttgaggtttcattcttaccttataattcttgcttgtacataatgaaatttgctagtaaaggacagaagaggaagaaactatctcccttttcattgatcattatttgccaaccccaaagtataattttcatggattatgcttattatggaaagagttccagctattacctcactaatttgtttgttgctgttttaagatagtatccaatctgttctttaagttttaaaatttgaaataataatagcttctattatatttaatatttctcagtgagtctctgtggttaaaatgtggtttcctttacatgccgtctgtttcatgtgcctcagtctggtttcggaaagacaatatgaggatgtaatttccaagtattctgatttaataataccctttgtttttccttctgtgtggttctcaagagggtcaaatttcagttccctctttgaatcttttttttttgtttcattttttcctttttgacaagaaatgattcctttttttttattttgagacagagtctagctctgttgcccaggctggagtgtggtggcgtgatctcggctcactgcaacctccgcctgctgggttcaagcgattctcctgcctcagcctcccgagtagctgggacttcaggcgcatgccgctacacctggctaattttttgtatttttagtagagatggggtttcaccatgttaagtcaggatggtctcgatctcctgacctcgtgatctgcccgcctcggcctcccaaagtggtgagattacaggcgtgagccaccgtgtcctgctgaaatgattcttttttccctgtatatgtgtgtatatgtgttagaatgtgggatttcttgcttgtgctgtcttcgttgactgtggtcaaacaggaaaatatcctgctcagctgctccttcacagggaatggccaaagcatgagggagctttacactatcattggattcttttttattttaaattattgggcaaagtgtaattttttgacaggaggacagttagctaatgtaaaagaggcttgcttcatttggggaaaatcagtttttaaaagtttttattctgaaaaaatttaaatcagcagcaaagtttcaagactggttcaatgaatagctatttatgctctacctagattcatcttttttttttttttttttgagacggagtctcgctctgttgcccaggctggggtacagtggcatgatcaccgtgacctctgcctcctgggttcaagcagttctcctgtctcagcctcctgagtagctgggattacaggcacgtgccaccacgcccaggttaatttttgtatttttagtagagacggggtttcaccatgttggtcaggctggtctcgaactcctgacctcaggttgtccgccttgcttagtctcccaaagtgctgggattacaggtgtgagccaccgcacctggccaattcatcagttattaatattttgcaatatttgctatatctgtgtcctttattaattctataaccataacacaatgatcaaattcaggaaattgaatgttgatacaatgctttaattgaatacgcaatccatatttaaattttgccaattgtcccaacaaatggccttttatattatagaacaaaaagcttcctacaatctgggaagcaatcctagatcacgcattgcgttttgttattatgcctctttttagcttcctttaatctggaaagtttctaattttatgatattaacattttggaagaatatgtctcagggtttgtctcattgtttcctgatgatttgattcatgctgtacatttttgcaggaatgttgcataggtgataatggtgttcttcacagggcatcctattagagtattgatgatactggcttgttccagtttttataataggaaatatgatcaccttattcacgtggggatggcaggctgaaaaatggtctctaaaacacatccacatcaaatctttagaagctgtgaatgcaaaccttacatggaagaagggtccttgcagatattcttaagtttaggatcttgaggtgagataattctagattatcttgatggatcaaaaatgtcatcacaagtatccttacaagacagaggcagagagagatttgacaaacaaaagaaagaggaggcagtgcgacagcgtaggtagagattggcatgagatggctacaggccatggaatgcctgcagctgctagaagctggaagaggcaaggaacagattttagagcctctggagtgcatggccctactgacaccttgattttgaacttctggcttccagaactatgagagaataggtttctgtggttttaagcaccaagtatgtggtaatttgttacagcatccagtgaatgcgggagtctcccatcagttcatagaatttcaatagtacttcaacttaatttagaaaataagtttttaccttagagtgattgattacttcaaccatataacaaaaagttttctgcacatttaaagcagttgtagctgcatctaagtgtgtgggaaataaaactaggctgaagcgtacctataatttttcagtcaagagagtaatttaatacatttaaatgtactttaaaaatgaaaaccctgagtcatctttctaatgaatgagttgcatgtaattgggcagtgacttaatgccatcgtaattatgttagacaactgggaggtaatgcaaatggagcaagccatactgcaggcattacttttaaaggaggcttaagaaccttgactatgaagtacaggatgggagatgtaaattcatccttcattatcatctcaagaacttcagtggtaggactgatttgagattagtcaaatggtttctgcctttcctagaccaggaagaataagttgcatgcatctttcttatgtggaatcaaatgccacaatattgatggtaaaaaaaaatctacaattagattaaaaggatttgttcagcaaatattaatttcgtgcttattatatgtcaagcagccgaggatattcacagtcccaaacaaggtgcttcttcctttggagcttatgtttcagtgaagggagatagtaatgaacaagtaatacatagaatttgtgtatattagtacattatgtagatacaagattatgtagattatttatgtacaagatgtagataagttctgtgaaaagtatttcaagaagataagggggatatatagaagacctaggaggctggagagtgttagtggcttcatacagtggtgtcataaagggcttcacatttgaaaaaagctcttaaacaactgatggataaaagaataaatcatgaaggaagttagaaaatattttgagatgaatgaaagcaaaaatacaacgtacgaaaacttatgcattgcagcaaaagctgtgcttatagggaaagttatagctgtaaatgcctacattaaaagatcttgaattaataaccaagttaactttccacctcaagcaattagaagagaagaacaaacttaaaaggaaggaaacaaaaagattagaacagagataaatgaaatagaaaacagaaaaacaacacgaataatctacgaaaccagaagttgtgttttttaaagattaacaaatagacaaagtttgctaaactgactaagataaaagaaagacagtataaacaactaaaatcagaaatgaaagtaggaacatttctattaagtttgcagaaataaaaatgattataagacagtacagtgaacaattgtaacaccaacaagttagataacctacatgaaatggacaagtttctagaaacatgacaattagtgacttgagaagaaatagaaaatgtgagcagacctataagagattgaatcagtattcaaaaggctcacagaggaagagaaggttcagggcaagtgacttctctggtgaaatctacaaagcatttaaagaagaattacaccagtccttctgagactctttcaaaaaattggagagaagggaacacctcctacctcattttataaggccatgattaccccgataccaaaaccaaagacacttaaaagaaaaccagccgggtgtggtggctcatgcctgtaatcccaccactttgggaggccgagtcaggtggatcacctgagatcaggagtttaagaccagactggccaacatggtgaaaccccgtcgctactaaaaatacaaaaaattagccgggcgtggtggcaggtacctgtaatcccagctactcaggaggctgaggcaggagaattgcctgaacccaggaggctgaggtttcaatgggctgagattgcgccattgtactccagcctgggcgacaagagcaagacttcatcaaagaaaagagaagaaaacagaggagaagagaaggaaaagaagaaagaaaaggaaagaaaaaaccaaagaccaatatcctttatggatatagaggcaaaaaccctcaatagaatactagcaaaccaaatccaacagcatattaaaagtgttatataccattagtaagtggaatttatcccaggaatgtaagggtgggtcaatttaagaataatagtcaatgtaatacaccacattaaaatgaaaatggaaataccatgtgatcgtctcaatttttgcagaaaaggcatttgacagaattcagtacccttttatgattaaaaaaatgagcacagcaaaactagaaataggaaggacaagatgatgaaggacatttgtaacacaaccacaggtaacatcacactcactggtgagaaactgaaagcttttgtcctaagatcaggaagaagacacagatgcccactgtcatcactgctgttcaccattgtactgaaagttctagccagagcaattatacaagaaaaaaataaaaagcagtgagattggaaaacaagaagcaaatctgagcagagttgttaaggaagtaacaaaaacctcaggtgtcggctctaggaatttcatagggttgttctaacttgtaaattaaaattaaatgagaagtttgtatcccaatttatattcctcaaattaactaagcataataatgttttcagttttcattaggagttcacttgtgaaatgtttttaaatgttcttcacattttgccatgaaacctgtttttccacagttcttgagttttcatcctagagttaagtggagtcagtgattaccatcattctttgggataatttttcttttcatcccttggttggctgaaattcctttttctctaagagtttctggagataagtagttcttaatttcttgcatattataaaatgtttctattgttcttacacttgaataagagtttgataggcaaagttcttcacaccttcattccctgaggattttgtaagcattgctccattatcttttagcactacatgttgttatagggatgagtgaagccagtctaattttttccattttgtagatgaattgagcttttccctgaagggccaaaagattccttctttatctttgactcccagtaagtctatcaggatatgtcatcatactgatcattctatgtcagttcactctaagatatggtaggactttgcttttttttttttttttttttttgagaccaagtctcactctgttgcgcaggctggagtgcactgacatgagctcagctcactgcaatctccgtctcctggcctcgagcgattctgctgcctcagcctcccaagtagctgggattacagtcgtgtgccactatgcctggctaatttttgtgtttttagtagagaaggggttttactttgttggccagactggtctcaaactcttgacctcaggtgatccacccacctcagcctcccaaagtgctgggattacaggtgtgagccgctgagcctggccagaactttgtattctaggtcaagaagttttattaggatttttaaaaagatgtgtttctaaatttacttgtttttgtttatttttaacaataacttagaaatcttttatatagtatctttcaaaagataatggaatggtttaaaaatcttttttaatttggagaactgtagtacttattttgtcattttaagaaataaattaatggaaaagttactgttttagctatcatgggtaaagtatgaagtgtggttttttggtacttattttctataaatttggtcaaataacttcagaagactgatttctttttgttcacttttaaatctttttgtttttaaaatatttttaggcagaatttatacagtatatcagctgagtcatgatattgatgttggtcgtttccaaacactaatggaatgttttaccagcacttttgaagacgtgaaaattttagcatttgatcttctgatgaagttatcaaaaacagctgtacattttcaggtatcaggacttttctagtataaatgtggtatatgcatggaaactttctatcagcagataaagcaatctgaggattattcatgtgctttgcatctgcctgctcatgtttttggactgtttctttcagttatcattaacacctctctactattttggggttagtgggaaaggaggaaatatcaaaaagtaaataaggcacaaatcagtgagctttgctgtttttattgctttgataaaaagggaggtgtaggaggtggtaggttttattgtttacaagattattggtagattttagttaactgtggtttcccctgttcccttggacatgtaatattcgatcagaacacatcacttacagtaacttgcatttttcgagataatctccctttttcatacacttgagaaactgagtgtaaatgaggtagagaggatgtttctggtttttgaaccagcaatagctaaactgagactgaaacttaccgagtacttgaggttaacaacagttcctagtgctctacctcatccccagcccctccattcttcctgacacattgctcttcccactttggggtaggaattaaaggtggggttggaagtgaacacattgtgtggggatgagtctgcaggggacttccagaccctggctcttagctctgcccttgaggcttctcctagggctgttgggtcaccagcagagtactggttctggagcttagctatggctttctattagagctctataaaggccgagggtttctgctgcagctgagccatggtctaggctgtggttgttcagctgtgtttagggcatggtagcttgtagatgcagtggattctgtaggatcacatgccagagaggatagtgtctgtttctgtggcttctagatggctatgtagaacatctatctatctgtatctctcagaacatcaatcttttttgacttgggtccatattggaagttgctgtacagcatctaccgatgcctatgatttttcaggtgcccttgtgagcagaaagttccctggtgctcaggctgctaacttttgttaccatacacagtttttaaagaggagattttctcttcctctgtctgccactcctcaccttatcattcatcacatgtcacctcatattgtgtcaatagcgatgccccattcttggcaaatattttgagagtacctggatggagaaggcatattatggcataaatgtgaaagacctggcccttacatcactaaggggctcaggggacctctgcatctctaaatttgataaacccgtgcttggtatattgacactagccatagaattcaagaaatttagtaccacatgtggtttgctataggattttgattatactctctggcttgcagattagtaaaatagttaaaggaataggcattcaagatttaaaaatattaattatatatttgtattagggttttctagagggacagaactaataggatagatgtatatataaaggagagtttattaaggagtattgactcacacgatcacaagctgaggccccacaatagccctctgcaagctgaggagcaaggaagctaaagctgaagaacttgcaagagtctgatgttccagcgcaggaagcatccagcatgggagaagtaggccagaagactaaaccagtctaatctttccatgttcttcttcctgcttttattcttgctgcactggcatctgattagattgtgtttacccaggtggaggatggatctgcctttcccagtccactgattgaaatattaatctcctttggcaacaccctcacagacacacacaggaacaatactttgcatccttcaatccaatcaagctgacactcagtattaaccatcacaatattatatttccaaagtctttctttgggtgtcccttatataatatataattaatttttaatacagttaagtgtacagcagtttttgaatgctaacctgatctctctaaggacgtgtacatacgtattgttgacggcatatttttctcataaatagcttgactatcctactcacctaggttactctccttctttggagctgcatatcctaggtcttttgtcatattatacttcgattgacctaagatgacggaacaaagacattttagacttcaaaggctatttattatctttcttactaatgattaataaaacagttctgggacttaactgtcagttaaaaaatggtttagatgcttaattggttctttctaatacttatttaaacttgaactttggccactacttttaagttttttatttaggtcatagaaaataaacttatcaaatggtaaagaatttaaattgaaataaacagatatttaaatcagcacatttgatatccactgttgtgaaattataaaacatcatcaaatatttgtagacctataatcaacttcaaaattgagtgtataattattttttcctaacacaagatagggaataatcctagtagaatcagaatattattgagcagccaaaccctgacttccagacttatgaacacacagcttgccagttgttgaagttgggactaggacttatgtcttctgttgtcagcccagtgcctttccatgactacaacagcaaactgtcctttgttctgtcttctttaggacaggcgatgtgagtggatgtttctgtgagatataggtgtgggagctctgatgcataatttctgaggctgaattgatcactttgttttccacacacacaaagtttcaccaggtacagcctcccaggggatttgcagttttctccagtgaactacctgtataggaaggaggaagggagaagggcagccatatgatgcccaggtgaaacataagccctgagagactatgaactgccctgtctagaaatagtaaagatagtctggctgtagtcatagcaaaattctacaggacaaagtacacttttgctgaagaaagaagcagttttaaaaaaaggttttatcagtgttgaatttcccaattgaaattatttccagctgattaataatcattaattactgtaataaaaaactcacctatattcagggagagaggaaactaatgtttatattgacttacaattatatgccaggctgtgttgttttgttttgttttgttttttttcttttaatagagacagggtctcactctattgcctaggctggagcacagtggtgcaatcactgctcactgcagccatgaactcctgagctcgagtgatcctcacctctcagcctcttgaatggctgggactacaggtgtgcaccattacacccagctaatttttaaggtttttcgtagagtttttgtagagtaagttttttgtctcaccgtgttgcccaggctggtctcaagactcctaacctcaagtgatcctcccatcttggccttccaaagtgatggggttacagatatgagccactgcaccaagcctgtgttttttgttgttgtttttttgagatggggtctcactatgttgtcttggctgatcttgagctcctggcctcaagtaatcctcctccatcagcctcttgagtagctgggactctaggctcgagcccactgtactcagctccaggctgtgttttaaaaaatttactatttttttaaattaaagagatctttaatttgacagttactgagtctgcgctttattctaggattcggggaaactgcaaggcttatttcaggcagcattggagctcagcacaagcaccaaaccatacgactgtgtgacagcttcctacctgctgaacttcttaatctggcaggatgctctaccgtcatccttgtctgcctacttaactcagcaagttgcatgtgataatggagataggcctgctgctgtggtggaaaggaacacattaatgggtttgtattgatgtttgctcttatcaaaacgaatagcttagtctcagtattcatttggttagaatatctaatggttaaacatatattttgtggttttttatttaaaagtttatcagcatataagagcaccatgggttctcattatgcaaatgaacattttagtcagctataatacttttttctaaacagtggatttatgttgaataagtacatatacaaatatttattaataaagctcttttgaaatgagaatgacctctttctccaccaaaagtgtgcttttttccctacataaattatactgtgactagagacagaccatctttattgtttctatataggtggagttcctttttctgtcagggtttatgttttaattaactgtcatacccctgccttttactcttcccaaatagccagttccaaaacctagggtctgagattattcagatctagtgattttcaacaaatatttattggggattcatgtacttaattttatgctagtcagtcttcattttagaattgtactagaaataaggacagataaggatttttttttaataggaaaagggagatcagatatagaaagagagttaaaaattattatttccaggatggtagaaacagccatgaaaaagagaactagtaatgggagaaaaagaggaggccatgggtagttctggtgggaatatggccagagatctggagatagagaggtgacagtaccatggaggatgatgcttgcctacttgaattgcttcatagctggatttcaaaggagaccctattgagacagtgggaagaggactgcaattgaggtgaatagggaatgcatgcttcacataaaggctttcaattcaagacattttaggactttatgagatatttcaaacatacaaagaatgtttaaatatagacggcttaaaaaacatatatatatatatacatgtaatatatataaataatatgtaaaaagttcacaagttttattcacaagctaggtgatcacacttaccttaagtcatacaataacactcatatctttgaagcctttcctttatcctggctgtattttatattaatttttatcttcttttttttaataatattgcctctggtgtatatattattatatattattcagttttacatgatactgaattttctcagtagtacttactgtatatattgtacagatttaccacaatttatgaatccgttctcctgttgatggactttttctcctaaataaataatgccagtgtaaacattcttatgtagatcttttacatataggttgagcatccgtaatccaacacctgaaatggtccaaaatccaaagctttttgagtaccaacatgacactcaaaggaaatgcacattggagcattttggattttggattttcacatttggggtgttcaaagtatgatgcagatattccaaaatctgaaaaaatataaaatctgaaacgcttatggtcccaagcatttcagataaggagtacttagcctgtatattaatatcttctaatgcacatgtctaagagtttatggtaaacaaatggaataacctggtcacaaagtatgtgcatcttgaactttatgagatgatgccaagtaggcttttaaattacactctcaccaacaaattccgagacttgtattgcatcacatcatcaccataatttgctattgtcagattttaaaaatttatataatataaaacgatatctcattgtggtttcatcttacatttttctgattactaatacaattattttttcccatgtttacaagccatttacttttccccttcagtgcaatgcctgtcgatgtcctttgtccagtttttctgtagggttgtttgtctttttcttattgatttttaggagttcttttatatgttctgaataataatttactgtttttaccaaatctaatatttagaatataaccttctccttccaaggcgttgaggggagatgtctgttatactggtataactggacatgtacatgcaagagaatgaaattagattcactaccttatgccatatacaaaagctagctcaaaataaataaaagacttaaatataagagctaaaactataaaattcttggaagaaaacatagatgtcagtcattgtgatcttgggttaaccaatggttagttatgacttccaaagtacaagccacaaagggaaacaaaagataaattggacttcatcaaaatttaaaactattgtatgtgaaaggatgccattaagaaattgaaaaagcctgaaaaatggggtatttgcaaatcctatgtctgataagggacttttgtctagtatatataaagaacttgtacaactcactaataaaaggacataaccacattttacaattggacaaagaatctgaatagacatttttccaaagaagatatacacatgaacaatgagcacattaaaaagtgctcaacatcaaaagcctttacagaaatgcaaatcaaaatcacagtgaggaagcacttcacatcccataggatgactataatttaaaaaagagatgataacaagcattgatgaggatgtagagaaagtggaacccgcatagactgttggtgggattgtaaaatgctgtatctgctttggaaaatagtctggcagttcctcaaaaggctaaacatagagttaccatgtgaccctgcagttccactcttaggcattgtcttagctcgagctgctataacaaaatgccatagactaagtggcttaaacacagacctttattctcataattttagaggcagagaattccaatatcaagtttccagctcctgataaggggcctctttttgactctcagatggccatgttgctgtgtgctcacatggcaggaagagagagcaagctctggcctttgttcttttaaggacactaatcccattatgagggtcctaacctcatgacttaatctaaacctaattaccttccaaggtctccatcttcgattatcacattagggattaggacttcaaaataccaatattggggtgggggaggaagcacaaacatgtagtccataacaaggatatacctaagagaaatgaaaacatacatctaaacaaaaacttgtacaagaatgtttatagcaacattatttgtaatagccaaaaagtgggaacaatctacgtctgtcaacagatgaatggataaataaaatgtggtatatccatgtggtatggctatacagtgagctattattcatctataggaaggaatgaagtattgatacatgctgcagcatggatgaactttgcaaacattatgctaagtgaaaagccagtttcaaaagatcgcatattgtatgattctatttatatgagacgtccaggcaactagtttattttctgtctatagatttgcctactctggacgtatcataaatggaatcatacaatatgtgatcctctagggctggagaagggtagaggtgcaaggagagcagtgactgctaacgggtaagttttcttttttttttttcgtttggtggcaggagggcagtgaaaatgttctaaaattaattatggtgatggttgtacatatgtgactaataaaaactattgtatacttcaaatgtatgaattttgtggcatatgaattacatctcagaaaagctgttcttttttttcttttttaatttgaaagccatctgctgtccaattagcacatgccacatcagcctggggtttgataccctagtgagaggatgtttaggaggaaggactaagagtgaatgctgtaatggatacaggcagtttagggaaagacactcagttctgcctagaaatgagccaccctgttggataaccctgaaagatctctttttgattaaaaaactctagtgtaaagttcatttgagttggccatattaatgggaactattttgctgttcgtacatttacaaatgttttaagattgacattactttgattttctgtttgctttttctagttatcaaatgcttgatggaaaatcttgaggaagaagtatctcaggctgaaaattctctgcttcaggcagcagcagcatttccaatgtatgggcgagtccactgtataacaggagctttgcagaagttatctctaaagtaaggatttccacagctgcctcctgtctcagaaatccattcatttctgagctttaacctctggttggaatgtgtcctgggaaaggaatgcagtctattgctttgaataaaattgaaaatcagatttaaaaacatacgtatctgtgtatatttttatgtctcacatgttttatgtattgaacaattttgaaacacaaagtcaatccttttatctaattttcatttttaaaatgtgatttttgcttttagtataaatttccctaatgtccttgttgcagcagcctgcagttggtgagcgagtggagacctgtggtagagaagctccttttgatgtcctacaggctttccactgtggtgtctccagtcattcagagctcatcccctgaaggcctcatcccaatggacactgattcaggttagcaaatgaagaaggccggctagagtgctgtggtttgattattatgtctttacctctttttttttttccccaagtatttctttggggagatataaaagctaagttgaggagaaaataattattattatttgtggtatttctgccttttagcaatagttttaactattaaaaagtagcaaaaaaaaaaaaaaaaaaattcccaaaccagaggatgagcacggtaccttctaccccagggtaacttgagttatataatactgtataagttgaacatcccaaatctgaaaattggaaatacaaaatgctccagattttgaaactttttgaacaccaatgggatgctcaaaagaaatgcttattggagcatctgtattttggattttcagattagggctcctcagccattaagtacaatgcagatattccaatattcaaaaaaataaattgagaacgtttttggtcccaggcatttcagataagggatgcttaacctgtgctaaaattgagtgttccttttaatacacagaaaaatcatgaaatatatttatgtttggtgttgaaataaagtttgtaaatgtattttagagtgcaaagagaggcttgtattagaaaaactgactgtatcataaacactcactgaaccatatgctgaaataccttgggctgataattaaggtaatgtggagttatgtgttttgcacagagaatattaggttttgttctttcctaaaaatgagttagaagattggtgatggttcacgatagtaagacacatttatttagcctgttgttagtctaaataccaaattattttatttaattaatttttttttggtagagatgggatcttcctgtgttgtgcaggctgctcttgtcaagcaatccttctgccttggcctcttaaagcattgggattacaggccttagccactgtgctggccttaaatactaaattttgtcgctttagattttctacttgagcagtgcataagaataaggaacatgcaatcttatagctaatatttgggtcagcaaagtacccatatattctggatgagaaatcttgaatatttctgttacctactgtgggtagatcctacagaggatgctaacattatctttattagtgaagagttttaaggtatcagttggtctcaaaaactgtctttgccccacagacttttccttcattctgcctgtctttttacctctggttgtcttcatttttgctgcttcttccctgtgttatctgccatacattctgaattgcatgaggaaagtctcccctgaaagctgtaaaattgaatggataggattcttaaaaatttattctctgatcttttcttggtctttgcgtggtttcttttggggtcattgttagtttttcatggctgttgaaatttatttttgacaaaattccaggaaggaacataagatgttgattgaatcatcatgatagtaatttgcgtgtttgtatttcccatagtacctaaatataagtcaaaataatagatgtacaataaataccggttcttcgatttgttaattgatttcagatgattaccaatggctagttttgaaaatctgagcctggctaactccttactacctacatccattcattccttcaactcatgttcctgaacctctgctgtgagccagtttctgttataggcactcgtcactcagtaatgaacaaagtgttgcattcatggagcttacatttcctaatccagtgagtgcttagggaataaaaatgaaacttaatgtaatatgaagactgtaaatcataattagaaagcagtatattacataatgtgtttcaaagttgtggagtcgttacgatattcctgtcctataaaagattgtttttgctgttgatgggtttttaaaaatgtctttttacctttctatctttaaactttgataccttgtattatgatggggaaataatctattttctattttttatatttatttatattttaaatcaaatattgatttttttctacttttctgttgcctgcttcatttttctttcatagagaaatagcctcttaaaactaaatttattgaagtttattgcacttctttgacatgattagcaccatatttgagatatttagacaacactaagaaaagcagtgtagatgacatggtggcctttgtcctgtggacagtttcagtgagttttttttgttgttatatttcagtctaaattgccatattttaaaaatgcactcaagcatcatgaaaactgtataaataattttcatattatccaccttgtgagtcccttctaataaagctgattattaagtattgaaaattatagattttttgagtaagcatccccaagggaaatctggcatgtgatgtgttactgggtttcatgtacgctcatttctttccctcagagtcagcaagccgcttacagatgattctgaatgagattcagcctcgagatactaatgattattttaaccaagccaaaatattgaaagaacatgatagctttgatatgaaggacttgaatgctagtgtggtgaatattgatacttctacagaaatcaaaggtaacttgtataaaatggatactgtaattcatgtttaagtaaccagtaaaatgtacagaatgccctttttatatggtaaattagaggttgcaaatctgtgcagaacatttctagaaaataaagttttttaaaaattttgttttgggaaagatttgggtttaggaatggatttataagacttttaccaggggggtggagccaagatggccgaataggaacagctccagtctacagctcccagcgggagtgacgcagaagacgggtgatttctgcatttccatctgaggtaccgggttcatctcactagggagtgccagacagtgggcgcaggacagtgggtgcagcgcaccatgcgcgagccgaagcagggcgaggcattgcctcacttgggaagcgcaaggggtcagggagttccctttcctagtcaaagaaaggggtgacagacggtacctggaaaatcgggtcactgccatcctaatactgcacttttccgacgggcttaaaaaacagcgcaccaggagattatatcccgcacctggctcagagggtcctacgcccacggagtctcgctgattgctagcacagcagtctgagatcaaactgcaaggcagcatcgaggctgggggaggggcgcccaccgttgcccaggcttgcttaggtaaacaaagcaggcaggaagctcgaactgggtggagcccaccacagctcaaggaggcctgcctgcctctgtaggctccacctctgggggcagggcacaaacaaacaaaaagacagcagtaacctctgcagacttaaatgtccctgtctgacagctttgaagagagcagcggttctcccagcacacagctggagatctgagaacgggcagactgcctcctcaagtgggtccctgacccctgaaccctgagcagcctaactgggaggcaccccccagtaggggcagactgacacctcacatggccgggtacccctctgagacaaaacttccagaggaacgatcagacagcagcattcgcggttcacaaaaatccgctgttctgcagccaccgctgctggtacccaggcaaacagggtctggagtggacctctagcaaactccaacagacctgcagctgagggtcctgtctgttagaaggaaaactaacaaacagaaaggacatccacaccaaaaacccatctgtacatcaccatcatcaaagaccaaaagtagataaaaccacaaagatggggaaaaaacagagcagaaaaactggaaactctaaaaagcagggtgcctttcctcctccaaaggaatgcagctcctcaccagcaacggaacaaagctggacgcagaatgactttgacttgttgagagaagaaggcttcagatgatcaaactactccaagctacaggaggaaattaaaaccaaaggcaaagaagttgaaaactttgaaaaaatttagacaaatgtataactagaataaccaatacagagaagtgcttaaaggagctgatggagctgaaagccaaggctcgagaactacgtgaagaatgcagaagcctcaggagccgatgcaatccactggaagaaagggtatcagtgatggaagatgaaatgaatgaaatgaagcgagaagggaggtttagagaaaaaagaataaaaagaaatgaacaaagcctccaagaaatatgggactatgtgaaaagaccaaatctatgtctgattggtgtacctgaaagtgacagggagaatggaaccaagttggaaaacactgcaggatattatccaggagaacttccccaatctagcaaggcaggccaacattcagattcaggaaatacagagaacgccacaaagataatccttgagaagagcaactccaagacagataattgtcagattcaccaaagttgaaatgaaggaaaaaatgttaagggcagccagagagaaaggtcgggttacccacaaagggaagcccgactaacagcggatctctcggcagaaactctataagccagaagagagtgggggccaatattcaacattcttaaagaaaagaattttcaacccagaatttcatatccagccaaactaagcttcataagtgaaggagaaataaaatactttacagacaagcaaatgctgagagattttgtcaccaccaggcctgccctaaaagagctcctgaaggaagcactaaacatggaaaggaacaaccggtaccagccactgcaaaatcatgccaaattgtaaagaccattgaggctaggaagaaactgcatcaactaacgagcaaaataaccagctaacatcataatgacaggatcaaattcacacataacaatattaactttaaatgtaaatggactaaatgctccaattgaaagacacaggctggcaaattggataaaagagtcaagacccatcagtgtgctgtattcaggaaacccatctcatgtgcagagacacacataggctcaaaataaaaggatggaggaagatctaccaagcaaatggaaaccaaaaaaaggcaggggttgcaatcctagtctcggataaaacagactttaaaccaacaaagatcaaaagagacaaagaaggccattacataatggtaaagggatcaattcaacaagaagagctcactatcctaaatatgtatgcacccaatgcaggagcacccagattcataaagcaagtcctgagtgacctacaaagagacttagactcccacacaataataatgggagactttaacaccccaccgtcaacattagacagatcaacgagacagaaagttaacaaggatatccaggaattgaactcagttctgcaccaagcggacctaatagacatctacagaactctccaccccaaatcaacagaatatacatttttttcagcaccacaccacacctattccaaaattgaccacgtagtgggaagtaaagctctcctcagcaaatgtaaaagatcagacattataacaaactgtctctcagaccacagtgcaatcaaactagaactcaggattaagaaactcaaaaccactcaactacatggaaactgaacaacctgctcctgaatgactactgggtacataacgaaatgaaggcagaaataaagatgttctttgaaaccaacgagaacaaagacacaacataccagaatctctcggacacattcaaagcagtgtgtagagggaaatttgtagcactaaatgcccacaagagaaagcaggaaagatccaaaattgacaccctaacatcacaattaaaagaactagaaaagcaagagcaaacacattcaaaagctagcagaaggcaagaaataactaaagtcagagcagaactgaaggaaatacagacacaaaaaacccttcaaaaaattaatgaatccaggagctggttttttgaaaggatcaacaaaattgatagaccactagcaagactaataaagaagaaaagagagaagaatcaaatagacgcaataaaaaatgataaaggggatatcaccaccgatcccacagaaatacaaactaccatcagagaatactacaaacacttctacgcaaataaactagaaaatctagaagaaatggataaattcctcgacacatacaccctcccacgactaaaccaggaagaacttgaatctctgaatagaccaatagcaggctctgaaattgtggcaataatcaatagcttaccaacaaaaagagtccaggaccagatggattcacagccgaattctaccagaggtacaaggaggaactggtaccattccttctgaaactattccaatcaatagaaaaagagggaatcctccctaactcattttatgaggccagcatcatcctgataccaaagccaggcagagacacaaccaaaaaagagaattatagaccaatatccttgatgaacattgatgcaaaaatcctcaataaaatactggcaaaccgaatccagcagcacattaaaaagcttatccaccatgatcaagtgggcttcatccctgggatgcaaggctggttcaatatatgcaaatcaataaatgtaatccaggatataaacagaacgaaagacaaaaaccacatgattatctcaatagatgcagaaaaggcctttgacaaaattcaacaacgcttcatgctaaaaactcaataaattagatattgatgggacgtatctcaaaataataagagctatctgtgacaaacccacagcgaatgtcatactgaatgggcgaaaactggaagcattccctttgaaaactggcacaagacagggatgccctctctcaccactcctattcaacatagtgttggaagttctggccagggcaattaggcaggagaaggaaataaagggtattcagttaggaaaagaggaagtcaaattgtccctgtttgcagatgacatgattgtatatctagaaaaccccattttctcagcccaaaatctccttaagctgataagcaacttcagcaaagtctcaggatacaaaatcaatgtacaaaaatcacaagcattcttatacaccaataacagacaaacagagagccaaatcatgagtgaactcccattcacaattgcttcaaagagaataaaatacctaggaatccaacttacaagggacgtgaaggacctcttcaaggagaactacaaaccactgctcaatgaaataaaagaggatacaaggaaatggaagaacattccatgctcatgggtaggaagaatcaatatcatgaaagtggccatactgcccaaggtaatttatagattcaatgccatccccatcaagctaccaatgcctttcttcacagaattggaaaaaactactttacagttcatatggcaccaaaaaagagcccgcattgccaagtcaatcctaagccaaaagaacaaagctggaggcatcatgctacctgacttcaaactatgctataaggctacagtaaccaaaacagcgtggtactggtaccaaaacagagatatagatcaatggaacagaacagagccctcagaaataacgccactcttatctacaactacctgatctttgacaaacctgagaaaaacaagcaatgggggagaggattccctatttaataaatggtgctgggaaaacaggctagccatatgtagaaagctgaaactggatcccttccttacaccttatacaaaaattaattcaagacggattaaagacttaaactttagacctaaaaccataaaaaccctagaagaaaacctaggcattaccattcaggacataggcatgggcaaggacttcatgtctaaaacaccaaaagcaatggcaacaaaagccaaaattgacaaatgggatctaattaaactaaagagcttctgcacagcaaaagaaactaccatcagagtgaacaggcaacctacaaaatgggagaaaattttcgcaacctactcatctgacaaagggctaatatgcagaatctacaatgaactcaaaacaaatttacaagaaaaaaacaaccccatcaaaaagtgggcaaaggacatgaacagaacttctcaaaagaagacatttatgcagccagaaaacacatgaaaaaatgctcaccatcactggccatcagagaaatgcaaatcaaaaccacaatgagataccatctcacaccaggtagaatggcaatcattaaaaagtcaggaaacaacaggtgctggagaggatgtggagaaataggaacacttttacactgttggtgggactgtaaactagttcaaccattgtggaagtcagtgtggcgattcctcagggatctagaactagaaataccatttgagccagccatcccattactgggtatatacccaaaggactataaatcatgctgctataaagacacatgcacatgtatgtttattgcggcactattcacaatagcaaagacttggaagcaacccaaatgtccaacaatgatagactggattaagaaaatgtggcatatatacaccatggaatactatgcagccataaaaaatgatgagttcatgtcctttgtagggacatggatgaaattggaaatcatcattctcagtaaactatcgcaagaacaaaaaacgaaacaccacatattctcactcataggtgggaattgaacaatgagaacacatgggcacaggaaggggaacatcacactctggggactgttgtggggtggggggaggggggaggagggagggatagctttaggagatatacctaatgctaaatgagtagttaatgggtgcagcacaccagcatggcacatgtatacatatgtaactaacctgcacattgtgcacatgtaccctaaaacttaaagtataataataataaaattaaattaaattaaagaagactttcaccagcctattaggtgctgttgtgcagcgaacaagctgttagaacagaaagccttggagtgataaaacctgccttgacagcccaggtgatataagagcagtgctatataatgaacctgggtttgggcagcaatcaacttctcccagcaatgtggttcattgtctgctgtgagagttcttaaagtcaagcaggcttttaaaggaaacaaaccttattagtaaaatgggagctgctttgttgtgtcaagcttccagaattcgagttcttacatcttgtttgatcattagttgttactgaattttctgcagtgctgtaaaacgtcatcagaagcagcaatttcttagtgatgtattacatattctacattctccactaggtggggatattgtcttgcaaaaaattatctccacacttaaatttttaaattacacaaaataatgtataaatgtaattatagcctattgtaatagtttcaaacaacagaggtacatatgaattaaaaacaaattaaattcctccaaggtttcctctccaattccatgtcttccttctttagtgcaatatattattttgtacttattttatatgtttatgtgtatgtacacttacccatttaatgcattgggctttttaaataaaaacacaaatgaggttaccctataagtaccattttgtcagcgtgctcttttatttaatataatagttcatcttggattttaaaaaaatatcagtaccaaaaatactcctaaaactagaataagagagtaagtaaggctaattatagcttattggccatgggaattaaatatattttgaaagataatttgtattttcctttgattttaaaagttatattctactcctttactaatgcaacagtcatgctcaccaaaataaataaggagtgtatttattatagtcatccatatcatactttatgacagagaggcagagtttgtttaatctttggaaattaaagattaaacaagttttggaacaatattgtgttttattttaaaatttaatttgaaaataataaattaaaatactgggcctggcatggtggctcatgtctataatcccagcactttgggaggcccaagcgagagaattgctttagtccaggaggtgatgtggtgaaaccctgtctttacaaaaaaatacaaaaattaactgggtgtggtggcgcatacctgtagtcccagctactagggaggctgaagtagaaggattgcatgagcctgggaggtcaaggctgcagtgagccatgagcatgctactgcaccccagcctgggtgacagagcgagaccctgtctccaaaaaagaaaaaaaaaaaaacttagcatgatttcttctcataacacatgctcgacaaatgttagcttctttccttctgagtaaatataacatgacaaatcgggtttgttcaagcagattattcttggggaaattatgaataagcttgtttttagaaacctgggatatgagtaatcaaggttgcaatcgttgtgtttttttttgtttaaggtaaagaagtaaaaacatgtgatgtaactgcgcagatggtgctggtatgttgttggagaagtatgaaggaagttgctttacttttaggcatgttgtgccagcttctgcccatgcagcctgtgccagaatcttctgatggattattgacggtggagcaggtaaggcacatgtttattccaccatgtataatttctggtcaacgcataaatcacttttttttttataacccaactctaaaaaaaggtttaaaatttttcttgaataaaatcatacaaatgttaactgaagaaagttcatggtaatttagaatgttagactttataatacatttcaaaactgtggcatttttagaaattttttctaaggtatataaataactgtagattttacctcacttttaactgtagttttatctctaatttttatttctccatttcacatacacagacttaaactttagcttaaaattgtcttatttagtaaaactccacaaatctcttaaattttggaaagaaaaaaagtaacatgttggttgattatggatctcatgtttcccactgcattgataataaagttgtagtcttggtttttttggctgacttttgttttaagaccacaaagttagttcaccatctgggactgttcaagtgacttgagtgcggtgtttacaagaagttagcttaccacaagcatttcatttggaaatattttagatttattagatttctgtttttaattgattccctcttcctttccatatggttttgacaaatccatttcccaccatttttcagcaaagatatataacatgtactttcatttttaactttttaaaaataaaggcaactttttccctagggtgttacaattcaagaacaaaacaaatattgtagtatgctaatgctgattatttctataataaccacatgactagttccatggaaataatgctaatactttttttctcacactctgtggcttatgttgcatgcatctggttaacagctgcgcttgtgatgttgcaaggccttgagatgaagaaaggcaaaggcgcacaggacatttcaggcatcattatgttccttattctcttccaaatcaaataggcgtcagtgtcctagagttacttgcagtcattgctggtgactggctgtagtgccaatgccaacatctttgctgaggaatccagctatgattaatgattacttcactgatgttcaccatcttgctaagaagtaaacatgtgctagaggcctttgatttcccaacttctctttccaaggacaagttaaaacatttagttttttgggtttgttgggtagtgtttaaaaaacaaattaagggaagtgtattttgcttttactgtaactaagacgtgaaagcttcctatgaacattattttgccttgacacttttcacatagcacccaaatcttatgtatttaatttgtgtgcgacagccgtgttaaaattgggaattaatgtaaaataagagatgtttgttaaaaaaaaaaacaattatcacaaaaagacaggttcttataaaccaaagaattcttccagtgactgcttaaataaaaaataagatcctgactgtttttctgtaaaacattagtttccgttgtaatgaggtccagtcatttttctatgttgccattcacatggtaacctcacatacataggcgtgagaagaaactgatgactgaatgagcgatgaactgtatatgtaatagcagtgttctaacactggaaccccgtcccctatgaaaaacttgattcttcgtattgctgactttagctaaagaaatgtctcagtttaggagtcaataaaaatccaaagtcatcaagaaattagtgttatttacattactggagaattcctgcttttaaacataaccttttgccccatgaacttcctttaaattaataataattaaatatacttacatgtgcttaaaacctttaagagttaaaaatataaatgacagagaagaacatcatttacattggaatggctgggccacacctgaggtacacccttccaagagcatagttgccctggcaaagctagatctgtgcctagtggtaaaactatgagtttaagagtcaagccttaggtgaatgtgactgccgtctgaatacacggaggcagtgaagtgacttgcaggcagaatgcaaccctagttagaggggagaatgtggaacttgcatttcttattcttcagagtagtaactgtgatctacttttctctcaatggatgaagaaagccattccatacagtctaaaatacaattctattctattttgaaatttgatgacttgaatgtagatgacagtccgtttaaaatcatcctgattttacagctccttgtttaaaccggtggccacttaaatcccccatataggagtataaaaggtagggagattacagtttggggttttttgttgctgtgtggggagaagaaatggggcttgtttataattctgagttttcagtgatatattcacaaaccattagagctggaaggatcatagagatgatattatccagctctcttggacaagaggaagctgaaccctggatgttacctggtttgcccaagattgcaaagctagtttgtggcagctctggaacaggaacccagttcttctccttgccagcctgtgttctgacatggcacagtgctgcctttgtgagctgctcatttaatttttctttaagtttaattttctgtatttcccatatccaggtaaattttcgcaagcaacaggacagtaagatgacttgctactgaactttttcttaaatgattgattccctagagcacttcctgtgaagcagtgtgctgtcaccagtttctccaggaggaaaatgtgttcattcagaggcatgtctgactttcctccttcactgtaatcacataatgaaaggttctttcatagtgttcctgtacaagaggcagagataaaaccaactttgagggatgtaagtggagacccttcaagagtaagcagtacacacaaccttatctcacaacttcctgactagttgatgtgtgtggagttttcaaacttgatgttttgctgatgtagagcttttgcttgttatattttgttggttctcttttcatgggctatctgatacccagtgcctactgattttttaaaacagcttcctccacctggagtactatatgaacttaagtttatatgtatttccctaatattcttaaaaagaaactactaggtagatttttcattcatgctttccctctgcagtaattatcgccacagaaatcacacgagtaagattgccaactattagaaattgctattttaaaacattcttttttagtttagtttttttttttttttttgagtctgggtcccattctggcgcccaagctagagtgctgtggttccattttgactcacttcagcctcaacctcctgggcttaagcctcccaaatatttgggactataggtgtgtgctaccactcctggctaatttttgtagagacgggatctcaccatgttgccaggctggttttgaattcctggactaaagcgatcctcccacctcagcctcccaaagggctaagattacaggcatgagctaccatgcccggtctaaaaattgtatgttagattctgttgtaacttttatgatgcccagagttaactacattgatgtattccctcagtagtgtcttttgttattactttagattttctgtaatgaactacaaatgggatatatgtttattcacaagtcttaaattgctttttgtattttcttttgccaaagtttattttttagaaattacaaataatttcattgaattgcactcaatgcaagttcccatttttaagctttgaaatgaagttgtgcatgtaaccacatcctatttattgactgccttactacaaggatatcgtgggaaaataaagaagtacatagtatgtggttctgtgacgtcaaagggcttagaaatacaatagaggataccagacagaaattcattttaaaaagtcagactacagggcaacagttaatattgcccatggttaagaatttgctagaaagcaaagaataaacattctggtaagatgatatctgagtggtagaaaattattacctttgttgttttgtaggagaacagtgtttgagctttgaagaaatcccaaaagttagtaacaaatcactgtaggagagaaggtacagtttaaaacattaactgttttactggagtgtaaacttttgtaaaacatcccgtttaaccaaagtgaaattagaagtggctgtgtcttaaagtcagaattcaaattaaggcttagggattaaggctcactactttatagtataaaataaaaataaaatggacatttactgtttgctactctttgccaggtactctgataaacacttaaatgcataatcttattatttatttctcacaataatcctgtgaagtaggttctagtgttagctccatttcacaagtaaaagaactgtgtttaattactttgcgttagtagtacatttcagaatttaccttctctagataaagggtagatttaaaatatatttatattttttttaatgggttttatgctttagatgagcatttagatcccctaattagtctgttggtgaattatacctgcctggaaacatggcatgtagcttcttcccctgtggaaatttataccctgtgagtccataaaacatgttaatttccctatagagatactttttatgaaaagttaagagcaggatatgctaattttaaaaagacaagtgattagaatttaaatttctgttctttaaattttaagaacagaaatcactgtatttttctttcactttgatcttaatttcctttataaaaatcctgagatgtatgttattaaaaattattttgctggaggtaacatactaccagacttcaaaatatactacaaacctgtagcaacaaaaaagtgtggtactggtgtacaaacagacacatagaccagtggaacagaatagagaacccagaaattaatgtatctaccgccaactgattttcgataaaggctccacgaactctcattgggtaaaggactgtccaataaacggtgctgggaaaactgagtatgctttcttcatatgcagaaggatgaaactagacccacctctcactctatacaaaaatcaactcaaaatgaataggctgggcacggtgggtcatgcctgtaatcccagcactttgggaggctgaggcgggcggatcaagaggtcaagaaaccaagaccatcctagccaacatggtaaaaccccgtctctattaaaaatacaaaaattagctgggcgtgtggtgtgcacctgtagtcccagccactcgagaggctgaggcaggagaatcgcttgaacccaggaggcagagatcgcaccactgcactccagcctggtgacagagcgagtgtcagtctcaaaaacaaacaaaaacaaaaaacagaaattaactcaaaatggataaaagaccttcaaaacaataaatggtaaagactactataaaactacttgaatagtggtatttattcaggacattgatctgggaaaagattttttctttttttttttttttttttttttttgagtctcgctgtgtcgcccaggcttgagtgcagtggcgctgtctcgggtttagatgaacctctgcctcctggcttcaaacgattctcctgcctcagcctcccaagtagcttcgattacaagcatgtgccaccctgcctggctaatttttgtatttttttagtagagatgggatttcaccatgttggccagactggtctcagactcctgacctcaggtgatctgcccgacgtggactcccaaaatgctaggattacaggcgtgagccaccgcctggcctgggaaaacatttttataaataagacctcaaaagcatagacaacaaaaagtaagtgggattatatcaaactaaaaaccttctgcacagcaaaggaaacaacagagccaaaagataaacttcagaatgggagaaaaaaatttgtaaactattcatctgacaggattaatgtccaaaatgtacagggacctcaaacatctcaacagcaaaaaaaaaaaaaaaaaaaaaaaaaggacaaatgatctgaacagacatttctcaaaaacagaaatgacgaacaaatatatgaaaaaatgttcaacatcacaaatcagggaaatgcaaatcaaaaccacaatgagatatcatttcattccagttaggatggctgttcccaaaaagacaaaaaaataacaaatgatggcaggaatgtggagaaaagggaactcttacaccctattggtgggagtgtaaactagtatagctactgtggagaacagtgtggagattcctctaaaaactacacatagaaataccgtatgatccagcaatcccactactaggcatttatccaaggagaaggaaatcagtatattgaagagatagagtgctgcaaccccttgattgaatagtgttgcaatcccatgtttattgcagcactattcaaaatacacaaggtacgtaatcaacctgggtgtccaacaacagatgaatgggtaaagaaatgtggtgtatatatacagagtggaatactattcagccataataaagaatgaaatactgtcattcgcagctacatggatggaactggaggacattatgttaagtgaaataagccaggaacagaaaattaagcactgcatgttctcacacatgtggaagttgaactcgaagtaaaaattagagcagaggatactacaggctgggaagagtagttgagagggtggagataggtagagttgtgaaaggataccaaattacagctacataggaagaataagctctagtgttctttaccacagtaggatgactatagtttgcaataatatatatatattaataattccaaatagctagaagcaggatgttgaatgttcctaacacaaagaaatgataagtgtttgaaatgatggataagctgattattctgatctgatcactatttattatatgtattgaaacattactgtgtaccccataaatatggataattatttgtcaatgaaaaagaatttttaaaaatgctttaaaaaatctgtcttcataaaagggtttacatgtctttattatttcaaggtgcattttaatttttgatgttattgtaaatccatctttataaaaaatacatatttgaactttatcttgctgggctataaaaatacaactgctttttaaatatttatcttatattcatccatattactaaactctattattttaatcatttgtggattatttgtagattatatgtccataatgtcacctgcaaacaagagttttttgttttaaatttttattttactttaagttctgggagacatgtgctgaacgtgaggtttgttacgtaggtatacatgtgccacggtggtttgctgcacctatcaacctgtcatctaggttttaagccccgcatgcattagatatttgtcctaatgctctccctccccttgccctccacccaacgacaggccctgatgtgtgatgttcccctccctgtgtccatgtgttctcattgttcaactcccacttatgaatgagaacatgtggtgtttgattttttgttcctgtgttagtttgctgaggatgatggcttccagcttcatccaagtccctgcaaaggacatgaactcattctttttttgtggctgtatggtattccatggtgtatatgtgccacattttctttagccagtctatcattgatgggcatttgggttggttccaagtctttgctattgtaaatggtgctgcagtaaacatatgtgtgcatgtgtctttatagtagaatgatttataatcctttgggtacatacccagtaatgggattgctgggtcaaatgttatttctagttctagatccttgaggaatcgccacactgtcttccacaactgttgaactaatttacactcccaccaacagtgtaaaagtgtttctatttctccacatcctctccagcatctgttgtttccagactttttaatgattaccattctaactggcatgagatggtatctcattgtggttttgatttgcatttctctaatgaccagtgatgatgagcttttttcatatatttgttagctgcataaatatcttcttttgagaagtgtctgtttatatcctttgcccactttttgatggggtggtttgtttttttcttgtaaatttttttatgttccttgcagattctggatattagacctttgtcagatggatagattgcaaaaattttctcccattgtgtaggttgtctgttcactctgatgatagtttcttttgctgagcagaagctctttaattagatcctacttgtcagttttggcttttgtcgcagttgcttttggtgttttagtcaagaagtctttgcccatgcctatgtcgtgaatggtattgcctaggttttcttctagggtttttatggttttgtttctttctcttgcctgattgctctggccaaaacttccaatactatgttgaataggagtggtgagagagggcatacttgtcttgtgccggttttcaaagggaatgctttcagcttttgcccattcagtgtgatattggctatgggtttgtcataaatagctcttattattttgagatatgttccatcaatacctagtttattgagagtttttagcatgaaggggtattgaattttatcgaaggccttttctacatttattgagataatcatgtggtttttgtcattggttctgcttacgtgatggatcacgtttattgatttgtgtatgttgaaccatccttttttttttttttttttttttgaggtggagtctcactctgttgaccaggctggagtgcagtggcacaatcttggctcactgcaacctctgcctcccgggttcaaacgggtctcctgcctcagcctcccaagtagctgggactacaggcgcatggtgccactcccggctagtattttgtattttagtagagacgggggttttactgtgttgtccaggctggactcgaactcctgagctcaggcaatccaccagcctcagcctcccaaagtgctggcattacaggcatgagccaccgtgcctggcctctttcatattttttttacacttttcatttcttcttattttagtgtgctggataggggctccagaacagaattcagtagaagttgtgacagtaggaacccttatcttgttcctgattttaaagaggattaaaaaaaaacacacaccaaaaaaaaaaccctacactgttgtctgtgatgtttgcctattgggtttttataggtattctttatgatgttaaggaagtttttgtctcttccaagtttgctaagaggtttttttaaaaaaattatgagtcgaaaaaaaggaaaagactagaaagaaatgcaataaaaattaatagttacctctaaaaaattattttgtacatccattatccattttgtgaaccttaaatagaaactcagtggtatctaataggcaattgagttggagttttcagaggttttcattttaaagtgaaaattcagagattttcattttaaaaatcaaattttgaaattgtttctgattttgttgttattaattttgtaagtggtttgagttaagtctgtttcatgtagtctgattatccactgggaggctgtcagcctggtgtgtttcttctctgttcagctgctcatggactacactgccaagcccactagtcatttgtaatcggattcttctcttccttgtagccttgtccttactgttttctagcacgaaacctctaggtcactcagccaggtttacttacccttgtctgtgtatgctcattcattgatatgaaaagacctagcaaagtatctggcaggtagctggcacgcacttatttagtgttggtctattcattctagtctcccagcctcttctcatgttaattaccctctttcattttggtccacccaagtactgtaatagcctgttcaagttctggatgtgaagtgttttctcattattccagtgcaaaaggatctttcattttttggaacttatgcttctaatggacaccagacagcatgttggttttctttgccaaagtgaactaaaagcctgctgaggacaggcatcttgttttcatcttttctatctaccacagcattaagctgtgaagcattttacatggtgctaaagaaagactgttatctaacaggaattttacattatcttcaaaaggaaaaaagataataagcctaggtattagctatgtgggtttattcggaaattattaagtgcaaaatgaaaggaaaaactgcctatatctcagttttgtccttagaacatcaatctgttttctgtgcccaggaatacctagggttgaggtccatccttgagaagaccacccactggtcatacttctgaggtctttgatttttattatatgctttttgttttagacctcttcgaagggagtttgaataaaggaagcaatgaaaatctgatgtttgcctaaggagtaaattatgaactgttgtaaatccacagagaagcactttgtcagtaatgacaaagtttatgttttcctgaagtatgttttaatatctgcaacattttgggaaaaaaattaaggaagttagagaaacctcatctcattgactttctgtttttattttctgtctttaagtaccttcttagaaatctcttgtttctctaataatcgaaatgatggtcattacaaataagctaactggtggttcttctagtccttattttgtattagtattatttttttaagctggctatcatgagttacttattttataggattatcgggcttcagccctattttaggggtttaattcggatttaagccttgataattctgttcaaacaatgctctgaaattaccacattgaagacaaaataaggcttacctgactgtggctcttgacaactggtagtatgtggtctttaaaagatactaaaatcaagagtatcatcagatctttacaggaaaactaactgaagaacatgacctgtcactctttgggatactaaagagttagaattttttttaaaaaaattattatatactgcttttttggttctttgttagtctcctatctgattcttgtttctccatgtgtatcacttattatatctttataatcagatgtactttgagtgtggattacgtctttagttttcctctatttagaaccctagtcagaactcatattgaactgaattggattataggttctgggcctgttctgagcttttcagtttattacttattttaatacaacaacctgtgtcctaaatactggtattatctctagtttatggatgaggaaactgagatacttgcccatgatgacatgtttaactacttattctactgtttatcatctctaatgtgtgcagaatactaatctagtccctatgctgagataggaggtgtttctaggtaagcatatctgagatatcttgggacaacttgtcttttaccatcctgtgatctgttggggagacctggatcaagagatagctggttacagctttggtcctgagttttatacaaaatcttgatttttaaaagacaatagttactaaatctaatggtataaaagcctaatcagcttaaaagttaattctattcaaaaccttagtcaacaatgaattgtccgttttgttttctttaaaataaataatctggccggccacagtggttcatgcctgtagttaacagctactcgggaggctgatgcagaaggactccttggggcccaagagttggagactgtagtgcacagtgatcacacctgtgaatagccactgtacttaagccgaggcaacatagcaagaccctgtctctacaaaaaattaaaaaattaggtgggtttggtgacatacacttacagtcctagctgctcaggaggctaaggtgggagtattactgtaacctcaaactccttgagcctaggagttcgaggttacagtgagctatgattgtgccactgcactccagcctgggtgataaagcaagaccagaccctgtttttttttttttaaaaaaagtcatatttgttatttgtctaatcttgtgtggagaaagacagcatgtaggaaagccactgggtgacattctggcaaattccatggttctgtcttgaagtgaagcctagtagtttttcaggaggtcctttgcaccacatcttgcattgtcattaacaattttatgtctctaaaaggtaatacgggttattttttaatgggtatggagtttccatttgggaagatgaaaagttctctaaatgcatgatggtgatggttgtacaaaagtatgaatgtacttatgccacttaattgtacatttaaaaagggttacaatgataaatattatgtatattttaccacaataaaaaagaaaaaaaattttaaaagaaggaaaaaaggtaattatttcacctagacctatgtgtgtgagtgttgtcgctttgtgtgattttctgttggagttgaataacatgagctataacagaaaacatactgaggtttgtgaatgtgacataggaaggcagttctagtgtagcagttaaagatggtcaactctggagccagactgcttggcttcatgttctggttccattgctttcttgctgtctgaccttggataagtttcttagcctttcttggcctcagttttccaattgtgaagtagagataatgatcgtacttatttcatggaattactgtgaggattagatgagctattgttaaaaaaaaatacttaaaatggctgggcacagtggctcacgcatgtaatcccagcactttgggagaccaaggtgggcagatcacctgaggtcaggagttagagaccagcctggccaacatggtgaaacccatctctactaaaaatacaaaaattagccaggcgtggtggcaggtgcctgtaatcccagctacttgggaggctgaggcaggagaatcacttgaacccaggaggtggaggttgcagtgagctgagactgtgccactgcactccagcctggacaacagagcaaaaatccatctcaaaaaaaaaaaaaaaaaaaaaagcttaaaacatgttctgtcatatggtaagcgctaaatgaatggacccctagacctgggttctaaacagtgttactgatataaatacacttgcgaatgtaaacataaatcggacatttgtttttgctttttttttaaaggtaaaagaaataggagattactttaaacaacaccttttgcagtccaggcacagaggagcatttgaattggcttatactggttttgtgaaactcactgaagtactaaacaggtaaaacaaatatccttttgtgtacgttttaaaaagactaaatatacaaagcatatgcttggagtagaatttagttgtgtcttttgaagtttaaaagaataagacctggttgactacaaaactcttggaagaaattgttttcttaggtttcattgtatgatttactgcagataactgattgaaacgtccaaactgagttattattctgtcattgaaaggtgatttgaagcaaactcaaagattttgctaaaaatagctttgaaattactgttttttttttattgaatgaaataaatgttttgtctgtttgaaaattacttggtgtttggaataaaacaggccttgcaatttttggggtttgtattacagaagcacttaaggattttggtttttttcttcataattttatcgtatagaaaagtttaaaagaacagtaagtagactgaaaagtagaaaatatttttttccttttacctggaaaactacttagatagatttcatatatttaaccaaatgtatttcttgacattatagttacagataatttcattcattcatataatagatttcctccaaagagcttgtggggaaaccttaaattacttaatgactaagtgttcatggcaagtgttctctaaataaaaggtagtattttccaggaaaacatttccattgcctggaaactttttgaaatgaagcagagttctgccagccttgtagcctcagcaaacattttattttaggctgttaagacatctattccttgaatatttttgaaactttttttttcacatgcctggtaaaaacatttataaaacattttggcagttatgggctgcacagaatgtctttaaatgatactttttaaaaagtccctgacattaaactgctgatgttgaaaatattttatcttttcaactttttgtttccagtgtagatatgacttatgaacttttttttccctcaaaacacaacacactccactcctatcaaatcagttaacaagaatgtatgaataccagcagtgtgcttagtactgtgcttggtttggatgatattatggtttttttataagatgaagttcctgttattaaagagcttatgttttagtttgagaaataagtagagatgaaattcaaaatatttaacaaaaggtatgttgtgagcactgactggtcagaaccaacactggctgtatacagcacccagcatctctctgtgtgtggatgtgtgtggactgattaccagcctggaagtaagaccgacacacttgaacaagataaaactgccaaattttgggtgaaatttataaaacatataggaatagcagagagagaaagcaatggggataggctggtagggcttcatggaagaggtggaatttgtgctaatgcatgagttgaaagaaggaaacattgtgagtaaatgttcagaggctagaatcagcaaggtgaataaataaacctccttcctgtagtggtggagttggtaggaaataaccaggcaagttgatagattgaggccaaattatagtgtcttggaaatagatttactgtagcagggatggagagaggcatcaaacatttttgctctgaaatagatcataggaggcatcatagaatggaggaataccagtaatctgtgactctggttcttagttctgtgtatattcattccatttattggcaatgagattgtacaaaaattaacctccctaacctttgatctcttcatctttaaggaaaagggtatttgccctattgacagatctctggcttttgttgtatgaatcaaataaaatagatatttaagaagacctctttgcattatagaatttcctacaaatttaaaacatgagattgatgttggttgtggggttggcatgtaaaagcagttttctggttggaaatgttaggttagatagattgtaatacagattatagtaaggagagcctgcaatcagttataacaaagtagatctgaggtgatgagggcttcctcttgggtggtggctctgggaatagagacaaacatggggttttagttaacttttgtccccacatagatagtaacaactcctcacatgatgtatgcttagaaggaaagctgtggacacattttattacattcatggttttgtatctcaacaatttgggcagggctcagctgggtgattcttccttagggtatttactgagttcagttggtggcattcagctggcagatgaactggtcacaagggacctaagacaacttcactcgcatttatggcaccttggtgggactagctagaaggctgggcctagttgggactacatgtagcctctcaccccagcatggtagtcttggggttgaaattcttatatggcagcttgcttcccccagagagagtattccaagagaatcagccagaagctgtatgctcttttctgacccagccttggaagtctcattgcattgctttagtcacattcctttgattttaagtgcatcttaggaccagcctggattcagtctaccttttgacagcaaagtggcaagatcatattgtagaagtatacgcagataggagatgttgtggtagccatctttgaaaaacgccatctgccacatgaaccaactgaatgtgaatagtagaggttactagggagttcatggttgcttctgtgattctaagtcttggtcaccagacaaatggggttgatgttaacaaaacaaaggaagttgaaagagggaatggtttgataaagatgagtaagtttttttgttttttatgtgttgagtatgagataatgatggcataccctggtggaaatacttaagtcagatgttagagataggggattagtttgggtgatataacaaaaacagagatgtagatctgtgagttttctccaaaaatatcatagtaagattgcagtctttggtggagagcatgaaaggaaaaaagaacagaggtctaaggacagaggcttttgaataactgtggttgaatggtacagttgaaggcattccgaataaatggagcggggagactagggaatgcccaatgcctggtatcttagcccctcctaatctagtttaaagattttctcatggctgttactgttggcttttaaccaacctgttaggagttctcagctgttgctttcaaaccaagtagttcttgatccctttagagacatttcaaatctgctgaacagaatgttttgcagagaacatctttacagtgtgtgtggcttccttttgtttggtttttatttttaaaagaaaatttgtttcttttggagcccttttgagagcgttttataagcccttaagttatgaaaaagttgtttaggcatacaacatttaaaaagtttgcaaaaagaaatctgggcattcatgaaaatccacagaaatggaggccaactgctggccacctcttgaactacagctgtgttaaggaaggaagcacttaaagagattaatggataaataactgaagagttaaacatgacccacattgtttgaattggtttttaataggattatgcaaaatgtcttcaaatataaactgacttcactattaaacaatcatctaagaataaatagggatggagacattgttactttttctgggaatgttttgaaagcaacacttgcaacacacataacacaaatagtgtgttgagttaattttctgtaatctgatttttttatgtcgtgctttctatttagaagtcagtgaaatattcctgttctccttaaaaaacatcattgcttgcctgtgcataattacttgtctaagcatttgattggagtggttaagtttgttaatgtcataaaactctaaattcaactttttggtgacattcatatttgcttgtttactttctgtgatcttattatttgaagtcgttcttctgatgaaaatgaacagacttctaggatgttaagttgggaatccaactttaatttgtccaaccgtaagatacaaacttaactataaggggataaaatcattgattataattctaaatctagaagggagatttattagtgcttgatgttgtcttactcttcaaatattcgaattgctttacttgtaatgtagcttaatctacagatatttattgcagtaattataatcattttcacattattggcctgaaaaaattaaattgtgacatttagtagtttttgtcattaaatactagtactgactcatagacatcaacaattctgtggacagaaatcatttaaatatgtatttaaactttcatcagttaattatagctaccatgattcaaattcaacagaaaacttttgatgagcaatttaaatataatactgaaaaaataatttcttctacctttctggagaatgaaagaccaagtctctaaagaatatgcagttgagaaataaataaatgcagaatgtaatatataagatttggggaagagtcattcagctttgaatgaaagaatatacaatcttgtgtaaactttatttttaatttaatttatttatttgagacagaatctctctgttgccaaggctggagtgcagtggcatgatcttggctcattgcaacttctgcctcctggcttaagtgatcagaatctgtctcagcctcccaagtagctaggacttacgggtgtctgccaccatgcccagctaatttttgtattttttgtagagatggggtttcgccatgttgcttaggctggtctcgaactcctgggctcaagcagtatcccacctcagccttccaaagtgctgggattacggacatgagccaccgcgcccagcctaaacttttatttacatttcatttgggaaatgtgtctaaataagacactatttctcactgagtgtcctattaattttatttgaaatatgaataattaaataaagaataactaagagatgagccaccttggggagccatattcttttttttgttttgttttgttgagatggagtctcgctgtgttgcccaggctggactgcagtggcgcgatcttgcctggggagccatattctttatagagagaaaaatccttttaatttcccttttctattgtggattaaaagaatttggagaaaactagaatgtcttgatgtatacattctaagtgtttgttaatgattcctgcatttttattttcatttttaagcctactgtaatagttgagtcagatattactgtttttcctcgatatttgaacactcatttaaaaagttttcataataacactttgtcatttagacaatagcagagggactttgttctcagtgagtaacctctatgccagctttttaagtaaagttttagaatttttttaatattaatttttctccttgatcttagggaatgattatattaaataattgagagaaccagctatctggtacatcttccaatgacttcttttaatccactgtatcttgtccttctccccatggccctctgattggtaattcaatttagatttggtcattgtattattgcctgtgcctgcagctaagtcttcaaaatagccccctaatgttttagcctgcagtaagcctcaataatgtatgatagtggtgagggaggttaagatggcttctcttgatatgtagctttctaacaggatttcatttgggcaaatcatttttcaggcttaaagtttcctggtgcttcagggttgtgttcctatttaaaatatacatgcaaacaaccttcctgcacacatctattagtgtttagtttcattgaaataataaacatgaactttgaaataataaatataatacttgaccaaagattgaatggagttgaatgggaatttagcttatgaaataattagagattgggaaaatctctaagttagaaaaaataaatcatactgaaagagtttgaggaaatgaaggtgacatttctcagttagcaatagtaatataagttaaaaatagctctgtgctactacatgtagttggatggatgaagccatttaaaagccactttgtagtcagggaatcggatttattggtacaaaataattgtctaatgaccagttagttgggtatacagcttatgtaatttgattttagtctgcgggttttattcttatcttagaatacttatccagtgggagtgagatagctctgtggataggagttggagtaatctgtttatggaacaataatttgcttcagtgatctgctcaagacaatacaaaggcctgaatagcagctatagcctggcctgttcacttctgttacttttagtaggggcttaggccatagcacttagcataggaaaacagcaacaacaaaccccttaccttttttttgagctggagtcttgctctgtcgcccaggctggagtgcagtggtgcaatctcggctcactgcaacctctgtctcccgggttcaagtgaatctcccacctcagcctcccgagtagctgggattacaagagcaaaccaatatgccaggctaatttttttgtatttttatagagactgggtttcgccatgttggccaggccagtcttgaactcctgacctcaggtgatccacctgcctcggcctcccaaagtgctggattacaggagtgagccaccacgcccggccctccctacctctttttgtgcatctgcctgcctgcctgccttcttgtctgcctgccctcctgccctctttccttccctctttccttccttcttccctccctccctcctttccttcccttccttccctcccttccctaccttccctcccttccctaccttccctcccttccctctctttcctcccttcccttccttcccttcctatccttcccttccttctcttccttcccttccttcccttcattccttccctcccttccctcccttccctccctttcctccctttcctcccttcctccctcccttcctcccttccttcttccctccctccctccctccttccctttcttttttcttccctccctccctccttctttaagaatttctactcttcataccgtgctgctttctaggttctgattgggaaagtcaggattttggatataaaagactgagggaagctggatacatttttagtaagcttccttgagaactggtaaaccgtttgttgttgttgttgttgatatatatgtgtgtgtgtgtgtgtgtgtgtgtgtgtgtatatatatatacgtataaatatttgagatagggtcttactcttttgcctaggctggagcacagtggtgtgatattggctcattgcagcctcaacctcctgggctcaagcagtcctctcacctcagcttcctgagtagctgggactacaggtgtgcaccaccatgcctggctaatttctttgtattttttgtagagatgggcttgtgccgtgttgcccaggctggtctccaactcctgagatcaagagatcctccggccttggcttcccaaagtgttgggattacaagcatgagccaccgcgcctggccatattttgtagattaataacattttgtgttactgagttgtttatgatgaaccttgaaccccttttaagaaggttgcaattttacaatgtactcagaggctaaagacactgtatattttgtattaattcgacaagatagccaaataaaaacaaaataccttcagacaagaggctgtctgcttatttagtggaaaggcattcactaacaaaagcaggattttggaattccccatagctgtggttggtgactacatagagttggctcaaagaaccaaggactgtttcactcgagaacctttctttttatatccttgctaggccctggattgtgtgatgaagaaccaaaacaaacaactagggtttgctgtattgttcttgggaaccttgcatggtttcatttttacctctcaattccttcattatcataaacaccagcaaccctggagttttgaaatcacttccttataaagaaatctttccttgctggggagcagacagaaggttcattgaatagtcagaactctattctgctttttataggcacagtgacctcactattgagaagacttagggttccagctccctgctttttatacctggtttgtcaattttatgcctacctgcaggcacagctaatgtgcgccagctggcaccagcactagttgctccttaattattcaacaaaagatttcttaaacatctactgtgtgccagatgctgtgtttgactgagctctctttgaccattgagaatatgatatggtaggccacagttactgtgaacctagacataattaccagagtctaaataggaaacatataactgtggaagtaagagagggatgtgaggacttgaataagggactaaggattgtatgggaccatgatgaggagttttggggacattctcatcaggaactacttatgtattttagagtcattatcttctctatataacccagggaatgttcattgaattttcaaagcatttttattttattttcattctaaagcactgagaatcaagtgatttatctatagctacacatgtagttggtgattgagccagcactagaatctaaatgtttttctggaatttcatagcatttcagaggttagcagtttaacaaaagtttattgattattgctttctataaggaattgtgatagctaggataaaaatattgataaaacatgggccttgtttttagaggaactttcaacctagcattttaatctttgggattagataagtaagtcacataatttacaagacagacgttaaagaccaagacaaagatccgctcactgaactgtctatcctaggtgatgagaagaataattaatgccaataacattggcaaaaagcaaggcaagcaggagggcatgatgggagggagaataatgctttaaacatgctgagttaaaggtagttttgggaggctgcctagcgggatagcagacagttggaaatacaggtcaggagattagcagaggggtccaggttggagatagtgtgacctgggactcccccaatattttagcagtaaatgtccagcattctgggaaatcctttagtcccaggcaaatagggacagttgttcactccagctggaggtatatgtttgaaagtcagccaaacagaggaaatagatgaagctatgggcctagaggagatctcctaaagaggcttaagaaagaaaggaaaaagttatcatcttgaattaaattttataactattgttaaaactcagagacattgctcatatgaaacatagtttctactctgtgttcataagtgtacaaacctcggttaaataacacttttacatgaacctgaactatacttgcttttgaaccctgtacttggttttgttcttgggtcttagagaaaaaatgatctcttggggtagcagttaggttaatagagttgattttggtaagctgtttggggatttcagtaggaaatattcttgtatgaatactataaccctggtatgtggagatttgctgaatgtgtttgtacgtgttacaggaagctaagcagctgcatcaactgctggctcttaacagtggcacttctcattggaaaacatttttgtttgtactttcttttctagttattataccctctttctttgtcaacctggtttgttagactgccatattcaatgaagttagtaaattatatgtcattcatttattcaacaaatatttattgagctccctatagggtatcaggccgtgttataggtgctgggaatagagaaataacaggaaggaatgtgtccttgatacatggagatgtagaaaataataaactatctgctagcagtgtgtgtttttatgtgataaagtttggtggtaaggaagattctttcctactagactaaagtaatatttcagccagggcctgaatggcaagaagcagcaccttttctggagaagagctttccaagcaatgagaaccactaacgccaaaatctatggtgtattaaagaacagaatggtgtaagataaagtttaatgagattgtccagatacgtagggctttgtgagccaggatgagtttggattttttgctccctgggaaatctttgtgttttctgagagtctccaaccacatgtatataaaaatagaaggtatcttggaaatggtacacacattaatatttatggaccctagtaggtaacttcaagattacgagcaaatgaagtgcacgtgcgtttgatagagttgcatggaagcggggaggggactggatgaaaaaatgagaaacttcatggatgtgtaaaataaatggacataaagtttctgttcccagaaagtatactattcctttctaagctgccactttgttctttaacctaacaaagtgaaagtctgtgtttatgggaaagggaaaggattttcttccttcttgtgctttgtaagtaaactattgtttggtaaataaagatattggcagaggcttacccttactcagttgaggttatacaaattaccttcctggcagtttgagtcttttctgggaattttgcttcaatacgttggctttaaatgtacttcatatttaaatgtgaaattaattgctttgtgtttgcaggtgaagtaatttcttcaggctaccatgaatcattcagttaatataagaaagcagtttattaatagtaataaacttccccagttccctaagggagtgggggtacctcgaaaacaaatgagacacaattcaattcaagtcagtcacaaaaaggttatctactgagtggcttttctgtagagtattttaattttctagctagctctctattcatgtcacccagttcatttagaactattaatactttaacccccaccccaatggtagatgttcagggaatgaaatcaatctgaaaagtaacctgaataaaacatgatcaggaagttaatatcttaaaaattgtattctctggtaatacattccaaagccacatgaaaacattttgtaaatcacgtgccctttggaatttttattctgcggttctatttttaggacatagcatagtgcaaagcaaccactagctacctgatagatctctttaaaaaataaaatagtgaaattcactaaaacaaatattagagagttgatagtattttcatcatgagccagatctgagcatttagggcaggcacattgaaataatgcctttttattaggcaagggctttggtgtcaatatacattttaattctccctctgccacgtacttgctatgtaaccttgagcaaattatttagcttccgtctcttctacccccttattttacccaatttttaaacattagtgtgaaatatttgcatgtactagaaggtatagtgaatactaaaattagcagttgtacaaccacgatgtaaatacctggaggaagagtattcacggcagagagaatgtcaggtgaaaaagtcctgagaggcttgggcttagggtaggtatttaaggaacatcaggtaaaccaattatgactggagtagtgtgagcataggaaagagttgtagatgagatcagagaagttgtgaggactagacagcctaagacattgtgtaagaactttggcttttactctgagtaaaatggggagccattggagtgtttgtgaacagaggagtgacatgatctcatcttttaaaaggattactcttacttctgtgttgataatagactataatagtgaaaacagaaagaccgattagttacaatattgctatactacagaaaagagatagtgatgacttggaaagtggtggaggaagtaaaacgtgatctgaatctggatgtaacgtgaagatagagcaggcaaggtttgttgacagattagatttgctatttgagagagagagcataactacaaagtttttggcttgagcccctgaagagatcgatttgttattcttttattaggatgggcaagactgtgggtagagtaggtttttggaggaagatcaggagtttagtttggggcatgttaagtttggcatgtctagtagacaccccattgaaactactttaggtgtactttgttgaagtacatcctttagaatttcttttggtgagagtctctggaaggcagacttaatctttgtatatttcagattgtctttttcttacctatgcttttgaatgtactttaacggggtatacaattctggtggacagttgttttccttcactgcttttgttattgccagtgagaaacttgtgtttggtataattgatgttcctttgtagatctccagttttttttcctttaaatctcctgtggcttgtaagtttttttattaatcacaattttgctatgctttttccaggtatggaactatcgttatgtatatacacacacatactttatggttttttcattctgtatactgttttgggtaaatttcccagaaaactatcttctaagtcacgaattcgttagaattcatcttatctgttttatatgtgtgtgtgtatatatagtttatatatattatatataaaatattatatattatatattatatattatatataaaatattatatattatattatatattatatataaaatattatatattacatattatatattatatataatatattatatattatatattatatattatatataatatattatatattatatattatatataatatattatatattatatattatatataatatattatatataatatataatatattatatataatatataaaatatattatatattatatataaaatatattatatataaaatatattatatataatatatatatttatatatattatatataaaatatattatatataaaatatatatatttatatatattatatataaaatatataatatatataatattatatattatatataaaatgttatatattatatataaaatattatatattatatataaaatatacgtaaaatatatattatacataaaatatatattatacataaaatatatattatacatattatacataaaatatatattgtacatattattatatataaaatatatattgtacatattattatatataaaatatatattgtacatattattatatataaaatatatattatacatattatatataaaatattatatattatacatattatatataatatatatttatatatatattatatatattatatataatataatatattatatattattatatacaatatatatattatatataaaatatacatatatataaaatatataaaatatatataaaatatacatatataaaatatacatatatgttatgtatattatttatattgtgtataaaatatacatattatgtatattatatattatatataaaatatacgtatatattatgtatattatatatattatatattatatatatattttttaagacagggtctcactctgtcacccaggctggagtgccttggcatgatctcagctcactgcaacctctgcctcttgggctcaagcgatcctcccacctcagcctcccaagtagctgagactacaggcaagtgccaccatgcccagctaatttttgtatttttttgtagagatagtgtttcaccatgttgcccaggctggtctcaaactccagagctcacgtgatctgcctgcctcgtccttccaaagtgctgggattacaggcgtgagccaccgtgcttggctgaaagtacacttttatttctagtcttttttatttttatacatgcctgttcttatttcactacggcttgtttttcatgatttcttgttctttattttttttttttttaagggacagtgtctcactgtgtcatccacactggagtctagtggtgtcatcataactcactgtagccctgaattcctgggctcaagtgatcttcctgctttagcctcctgagttgctgagactacagatgtgagccaccatgcccagttaactcttcttaaatagaagttattcccttatttatcacttcagtatcctaaacatagttattttaaggtttttgtcagactgctccataaaattagtttcatatagagtgaatgtgtgttattactgatttttttaggttgtctttcttaatataaaatttatttctatattttgaattttggctcactggctatgatgggagccttttgtttactgatctctttctaggctctttcctctctatcagaggaactagattaggtagtggtattttgggtgtcccccttcacagtgaaattggggatatcatagatctagtcactgagttagtagtcagcctgattcagaggccccctgtgcccttggcttttcctactgctacagcctcaggcagctctggcagtagccctttttcaggttcttctcaaaagagatgaggctgctgaaattctttggctgccactactgcttctaaatctgtaactcttgggtctctggtatcagcacactcactactttgcatttctgttcatttttacccagatgattatcttgcttttggactcagctggttttggggtttctatttgtatattttgcatattgttaacattaacttgcattgtagggggatgtcctgtcaaaatggaaactcagctgtttcatctctatcatttcaattgaaacttttaatacttgcttttctcataataaccgatgattttagaaaatgaccattaagaacttattagacataagaacaaactcaatccttccaaaaactgtcattttatagaagagcaaagtgagaaaatggagaaatttagtaaattgccttggattgtacagctactaggtagcagagaaaggattctaaaccagataacacgggtccataatctgtgttcctaaccactgtgatatattccctctcatctgttagttgggaaaaataactttctcatagtttgttccaagaatgaagtaagagcagctgtgaaaagcctggtgtcgtaccagacgtgtaatagacatccaacgaatatttgtttttctttcctttgtggcaggcaaatatatttccagtatgatagtttaaataaaacttgtggccgggtgcggtggctcacgcctgtaatcccagcactttgggaggccgaggcaggcggatcacctgaggttgggagttcgagatcagcccgaccaacatggggaaaccccatctctactaaaaatacaaagttagctgggcgtggtggcccatgcctgtaatcccagctactcaggaggctgaggcaggagaatcacttgaatctgggaggcggaggttgcagtgaggcaagatcgcgccattgcactccaacctgggcaagaagagtgaaatttcgtctcaaaaacaaaacaaaacaaaaacaaacaaacaaaaaacttgtaagtagattttgtttaaaatgtagtatgtttaattttagtaaaaagggagggtggaagttccattattggaccaaattcccttgtatggctttgaggtcaggacttgcctgggagaggtgcagagctgagaagcaagggaatcagaggaatgggaaccggtggtagagttcacactggaaaccagataagtaaagaattctgcgtaaaagctggtttgatgctggggaattccagagcagaataagaaggtttggactagatggtaggagctggtgccttgagcatttcccagagctcatgaggttcctgggtccatggtgcagtgggcagagatggctctatcgatggcattttgccagccttgaccttgtagagcattcttctggcctctgttttcaaattctgcaaattaacaaggagcatttggttcttagtatgcaatactcaagggaataaataggcccagttcactgtttacagttatactagccaagtgtttaaattagggaattgcctctggggccttgacctagctctttccccagtcatctcatcttttacttcctcagctctcatatatggaccttccaccattcgacctacatgtccttcaaagtctagttcagattccagcccttccatgacactgtactgatcccatgtacgcctaatacctagtagttgcttcaagttaattggaagtttagagaaaggaaaagtcctcgtgagatgcagtatttggaggaagtttcatcagtttggatgaatagggatatgtgtggagaccataaacgaatgcttagttgggaatatgaggtgtgtgtgttgtatgttagtatgagaaccagcaaaaaacagtcttactagaccagaggagtttgtgtaggaacttggaaaagttaaggttagatttaagtaggagggttgggtccaggtcataggcaacctttcaagctaggagagtttgacaaagttagaagaggagttagatgatttggttaatagtcaagagccactgaaagttcatgcagggaagggtgatgcatagtgagatgttctactctcattccagacctgccttcttggagtggttggttttgccacagcctctgcgggctcactcagggaggcccaggggaggcccactgacagttgaggagcattattgaactagtatttagtgtatttgtatttcagcacacttaggaaattaaggaaataggaaagtacctctcatgtcctgcagttcgttcttccccttagtttttcctacgtagcaaatcccctacaggagacgaccttagactgtagcattatctataagctggttttaactttcccatggttctaggaagaaaatgcaagtataaattaagcccacagatattagatcaagtactctttaccttattcacctctataattccagcttcttttcttcttaggtagctaaatcaccaaaaaaaaatttttgcttttttttttttaaatttttttagttttttttgagatggagtcttgctgtgtcacccaggctagagtgcagtggcgccatcttggctcgctgcagtctctgcttcctgagttcaagcgattctcctgcttcagcctcccgagtagctgggattacaggtgcccgccaccacacctggctaatttttgtatttttagtagagatagggtttcatcatgttggccaaggtggtcttgaactcctgacctcaggtgatcctcccgcctcagcctcccaaaatgctgggattacaggtgtgagccactgtgctcacccggcccaatttttttttttttttttttttacagtgaagaaggaacaaaagaaggcagtaatctatatcattagcacttaagtaattactcttaggaatttggatttcagtttttgattggtcaactgtgtgaggattatatcaagctggcaatattattaatagagaaattatttcacaaaacacaagacatttatcttaatttaaaaagatataaaatctagtgcttgggaagtaacctcaatccttaaaaatacaaaagtgtggggcaattattttcattatgaaaaattccaaacacataaacgtgtgtatttgtgtatatgtatatcacatatatttaaaagtagagagaataataagcgacctttacccatcatccaaattcaatagtgatcaaagttgagtcacaactgcttcatctatccctttttattgttgtttgctgaagtattctaaaacacatccccgatttgtgatttttattcctatgtactcagtatgcatctctaaaaatatggaaactttgttccatgttcacagtgcagtggcacattttataaagaatttcttgatgttatctattatctagtacgtatataaatttcctctgttacttgacagtgtctgttttacatttcattgttcaaatcaagatctaagcaaggttcacacactacatttggttgttatgtctctgaatcttttttaatctagtggttgggagttttgatagctggttttggtggctgaggacaggagtgtcgaagaagcaagggtgaggtgatggattttaagatatgctaaaaggaaatctttagaatcacagagcctgctagtagtagggagatgtaattgtaacttttatgactgaaataatatttttaggcccatgtcaaactttaaaaaatgcctcctttaaagtagtcttatttatatattttgttctatgtgaaacatatagctgaatctgagttgctatttagaatgtttagtcagtaactgaagttatctgttttacaccaaactagaataaagaaaaaaaaatcccaatgttcctaagagatctaattctcactgtaaattggaaatcagttatctttctgcaacttttcttcctcaacttaaaaaagagtgtttttcctttggactttatctgtaaattttcatatattaatttcagttaaaaccaggtactaccttgctaagataattgtgtctacctaccactgaatttggtattccttgggcaatgttatacagtctagtagggcatacatttaaaaattttataaaaattaaatgtacttgagcactctaagatagcgcttaatgtaataatgcagaagctcactgatgtaatgttcaaatcgcctcaaaatgtttatgcctcttcccagataaattgctttaattctccagaggatctggttgaaaattttgtggtaggcctcattttgagagagatgaaaatgattactaaaatacagtttaaaatgtgttttctttgaatatgtgtaatccctataaacatagaacataaattatagtaaactataaacttatattctctttgttggaaatcttgagttgtatagtatgaaatatctgtgagaccatgatcaaccttttcctgaatattttgagtgtggatgcaaacccatgtatcaaaatttattttgcagacaagacacatgctttaaacactgcagttgttagaaatgaaatctttagatcttaagacccataataaagaggaaagtaggtgaaaagtatgagacatgttttagtttcacccccactcaatataaggatatttattatttactaacagtgtaaatgtgcatcaatagtttgtacttttaactttgatacctaattccgaatatttgattatatatgccttttaggtgcccaaatgtgagtctgcaaaagctgccagaacagtggctatggagtgttttagaggaaattaaatgcagtgatccttcatctaaactctgtgctacaaggcgcagtgctggaattcctttctacatacaggtatttatctgtaggaccctagctgtttgtttatatttgtcttttgatgatagtgtatcctaacctgtttgacgtgtgagtgagcgtattacacataaaggacatttctgtcttttcagcaccatagcatttgtggctttgttttaatgtggggatggtgtgttcctgtgacaagatctgttcttggaacaaaccctctaaaaggtcaatcttgtaatataaacagagggtggtataaatttctgtctgtgtattaagtaggcagacatcactgtggcacagtcattgctcacttccaggaagtgcacatgttaccccaccaccccactgtatttttttttaaaaatagtcttcctttcatctcaagaccttcaatactctctgtaggcaaccagtgttaacattttcttttcaattctcctataaaacgtccatccataaaataatcatgatcataatagtagctgacatttattagtggttatttcacctcattaactccttccctgtaccctattatcatccatatattctagatgaagagactggggtttaggtacgttaagtgacttaccaaaggccacagagacagtaagaactgagttaagacttgagcccaggcagcctgactcccgaacctctctgcatatgagaatatgtgtgtgcgagtccgttttccttttgaacacatatgaaaacatacacactgcttgctctttgatttcacttagtattataccttaaagattgcttcatatcagcacatttagatatggctattgatgggaaaatattttatttagaaattaagactgttaccttcatgaacccaaagaataaaaaccagtgtcttcacaatactaaatcagaccccatcctgaaagacctttggttaatatatagtaagattaaatccgggaatatggtggtataataaaagcactgaaaataaatggaatgaagtctctgatttttttcatgcccctacattttttccttatctttcttactcctccctcaaattcctaaaatccctttatgattttttggtgacagtgggcatcagttgcagaggttgttgacagagatcattgaagtagttctgctgaatggattttggtgaccttcagaaatcaacttttatttgatctgacccattctgtatcagtgtgtttcattctcctgcctctaattcactctgaccttgtgtttttacgtgtcatttgtctgtctgagatcaaatgttaagacaggatcaaggtctcactgcatatttgtgcagtgtgcttctttcagctctggtgcccaacttatactaagtattggtcataatgagtaatcagtaggtgtactttcttaccctagccttggcaagaatgccataactttacctagctctttgggagaaaaaagccgtggttccctgaagtcattttagtaattgaatgtagcttttttttagttgaatgaagtctaaatttttttttaaaaatctgcttaaagagagtcttcatttctcttagcgtgacttactaataaagttatattcctgttttggtggaaatctgcttagtgttagctatggaaaagaactgtctacttagtttgtgagtttaccttttgtgtagacagattaaaaaatattttcaatatagacataaagtttttttgaatagtcatttaaaaaatatatgttatctgagcctaaataaactatgagaaatttcttctaaatcaaactattttttgtatgtctttattttcctcttctgtagttttcaaatgcttcagaagaagctaactaacttgtaactttcactcttgagagccagtagctacaaacatgaaaagtagacatggagaaagggagtctgggaatgtgactaaagtgacattttttaacagctttattgagatgtaattcacatactatatagtcacccttttaaagtgtacaattcagtggttttcagtatattcacagaggtgtacaaccattatttagttttagaacatcaacccatgaaacctcccatactcattagcagtcacttcccatttctctctacccctgccactcagccctaggcaatcactaatctaccttccagatctatacatttgccctttctggacatttcatatatatggaatcatacagtatacgatcttttgtgtgtggcttctttcacttatcgtaatgttttcagagttcatccatgttgtaatatatattagtacctcattcctttttattgcctcaagtggcttaataccctatttttatgtttattggacatcggcaaagtgttagatacaaagtaagtaagaagctactgaaaatttcaaatataggacctctttggtgtttgcagtatttctttttgttccatggagtttcaaatgctttgatttgattagtcctccaagtaatgattcttttgtgaagaattaactaactgcttcatctccagggaggcttaacattcttacaagaattttaatccagagattttttgctttttaagtaaagagaattttcttgttagataaatttgttactgaaactgatttgtttattttatcagagctgccacctacttaggattcttaaggagttgtcaataagagccattttttggccttttagaattataaaatttaatgagcaaagtggaagtgaccttagagatgacatgatttcaccttcacctaaatttagcgatgaagaatctgtaggttcaactgtgaggttaaaccacttgcccacggccacatggcttaattaactttctttgataaccacatgtttttattaaggggattttgcattttgggattgatccagggaagcagcaaacaagtatatgtaaactaagaaccctgttaatttttgcattctttttccataggcactgttggcatctgaaccaaagaaaggcagaatggatttgttgaaaataacaatgaaagagttaatctctttggctgggcctacagatgacatacagagtacagtcccccaggtaatcatggaaatacacaaaccctccagtgttgttttttgttttgttttgtttttcacttttttcaagacggctgttaccgtcttgttacccaggctggagtacagtggcgcgatctcagctcactgcaaccttcgcctcccaggttcaagcaattcttctgcctcagccgcctgcagttgttttaaatctttgctttattttttaacaaaaagtttctgctggagataaagaactcttgaacattggacagacatttgaagcttgtttgaatagtttttctctccttcttttttttttgtctttaccatccacaaaataaaccgttgctttagttgaatatattaatcaaagcaaacaatttttaaactctggtgaaaacatccagcttatataagatattttataatactgttgcatctatgaatttgaaagtgcatatgctagcactttagaatttcatgtgtgcttctttgcgttgatgtacattttgtaactcagcagttgaaaatttcctttaaatatggtatctaccttttggggtgttcatattttactagcatttagttccttttagtcactacctacatatatgaagttaaagcactcctcatagctccacttcaccactagggagtaaatattaataactatcaagtactgcttgtacgttatagtctggacttcctcagttaatgcttcatagtaggacactcctttttggtttgtttgttttttgagacagagtctcactctgttgctcatgctggagtgcagtggtgcgatcgtggctcactgcaacctccgcctcctgggttcaagcgattcccatgcctcagcctcctcagtagctggaattacaggcatgggccgccatgcctggcaaatcagctgaggtcaggagtttgagaccaggcccaatcacctgttggccaggttggtctcgaactcctgacctcagggatctgcctgccttggccttccaaagtgctaggattacaggtgtgagccaccatgcccagcctatagtaggacactcctacccaactgtaaagggccatgctaggtcagggaacagattgagagctgaagtttacaatcaagtacgataagtacatatgattttatttcagaacctgtgggaggtgttaaagagagcccacaggccagaatgaggactgtggaaaagaaaggggattttatgtttattggatattggcaaagtgttagataaagggagcccatgggccagaatgtggactgtgggaaagaatccccattcttttccacagtcatatggaacatagtcatatggcacatagtggccagtacccatagatatgaaatgtctttatttctttaaaaaattgactgaaatgttgttaatcaccattcaaaaatgatcacttcaagacatttttcagtgaaatgtgaaaaaaatgtaattggttctattttcctagactatcacttttaaaaagtacatgttgagtatcttttatctgaaatgctggggaccagaagtgtttcagagttcagtttttttttttattattttggcatatttgcattatactgaacaggtcagcatctctaatctgaaaatctaaaatgctccaattagcatttccttagaatgtcatgtccgtgctttaaaaagtttcagattttggagcttttttgatttcagatttttggatttgggatgctctacctgtgctatttttataagaacatctaaaaataatggggcttggttttaacgagtgctggataattattgccctactctacttcaaggtgattaatggcattttagtgatcatttttatgaaattggtgagatttaaaaattttgtctctgaccagtcttctaagcttttttagttgataatttgctttccttctcccctcccagggttcatttctttattatttttattatgtatctttgaaatatttcagtatacagaaatgtatagtgaataatgaacatatttgaaaccagttccagtttaaaaaattaaacattacagagaccgttagttatgctgtggattcttccacatctcattcccgtttattcctcctcagttataatcactaacccaaattagtgactatcattcccaagcattttcatcatacttttatctccttttacatgaatgttgttttcgacactttttatactttgcttttgtcaatcaacattatattttaagattagtaagctcctgttcagcccctgttcactttcatttctgaacagtattttattctatttcatttcatcccttctgtgaatggacatttaggttgtttcccgttttcttctattacaaacaatgctgaaacaaacattcttgtgtgtctccttacacacgtgagtgtttctccaggttatatacctagaagtagaattgcagggttgtagggtacacacatattcaatctgatgctgttatgttgtctccaaagtggttgaactaatttatattcctgccagcagagtataagagtttccattgcttatcaacacctttgtattatcagacttttacagtttttgactttctgcttagtgtgaaatggtgttttctagttttattttgcatctttcttattactagttagctttaacatcttttcatatgtttattagccttttggtttatatatgaaagttgtctgttgaaagactttgcttactttaatattggttatttgtcccttcatttttgttttgtaggagttggatttttattgttgtttcaaaaatattttcttgatattgatttctttttgattatttgaattacatatatattctcccaaactatgttttctctttttactttgtggtctctattattatgtagatatttttaattttaataaaatagaataggtcagctttctcctttatggttgtacatttggatcttatttcagaaattataccccaagatgggaaagacattttatattttctttcttttttctttttctttctttcttttttttttttttttttgagacgaggtctcactctgtggcctaggctggagggcagtggcacgatctcagctcactgcaacctctgccttccaggttcaagcgattctcctgcctcagcctcctgagtaactggcattatagacttctgccaccatgccctgataatttttatatttttagtagagacgaggttttgccatgttgaccaggctagtctcgaactcctgacctcaggtgattctcccgccttggcctcccaaagtgctgggattaccggcgtgagccaccacacctgactgagaaagatattttatattttcttttaaaagttttcaagttttacttgtcataattttatgtaaatgaaaccatattattattttttactgataggatcttgctctgtcacccaggctggagtgcgtgcaagtctttatattacctgtaatttgtctttgtttagtgtaaaataaaataatttaatgtttgccatttggataactaatacagagacatttctgttataacacatccttttcttcttgatttatactgcgtctgttatgtgttttcatagataggtggttctgtttctgtgctgtctattaatctatctttggagcaaaaccacagttttatttttgtttcaacttttttgagatggagtctctctctgtcacccaggctggagtgcagtggtgtgatctcggctcactgcaaccttcaccacctgggttcaagctattctcccacctcagcctcctgagtagctgggattacaggcatgtgccaccactcccagctaatttttgtatttttagtagagatggggtttcaccacgttggccagactggtcttgaactcctgacctcaagtgatctgcccgctaaggcctcccaaagtgctgggattacaggcgtgagccaccacacctggcctaaaaccactagtttaattattatgtctttataaaaagttagaatatctggcaaggtgaatctctctttttttgttttcccttcagaatgaccttgggtatgtttgtcctattgctgttccataaaaattttagaattagcttgttaaactcaataaaaagcccttttggaattttggttagaatttaaatgtattgatttatttgggaaaaattatctttttaagtattgaatcttccatgagcatggcttatttctccatttattcagatcatttaatgtcatttattattttttaaactaattcccataaaagtctctcttttttttttttttttttttttttttttttttggagttggagtttcgcttttgttgcccaggttcgagtgcaatggtgcaatcttggctcactgcaacctccgcctcctgggttcaagcaatcctcctgcctcagcctcctgagtagccgggattacaggcgtgcaccaccacgcccagctaatttttttatttttagtagagacaggatttcaccatgttggccgggctggttttgaactcctgacctcaggtgatccacctacttcagcttcccaaagtgctgggatcacaggcttgagccaccatgcctggcccataaacgtcttatagattatttttgagatttatttctaatgtctttttttttgcaattatgaatggtacttttaaaagattatattatctgttgctgtttgagaagaatgcagttaatttttgggttataattgtgcttgtattcagcagcctatcagaattgctgtaacacagcaaatgacttacctgtaaattcttttggatttgttttatggataatcatacctttgacaaataatgctaagtttgttttaactttctattttttagttttttcaaaacagtttttattgtactttgctgctggaacctgtagtaaagtttggtatagaaagagagatagcaggcatccttatgttgtttctgatcaatctgctgcaatttttaatctacccagtatcttattaaggaaattgaattttattgaatattttttgcatctttttagataaatatgttttcttctagaaaatgcagatgtcatgaattgtattgatttttcaatttatctttgcattcttgcatatctcactggttttgtgagtgagactggcctgtggttttcctttttgtgctgtgcctgtcctgtctttttaaatatgcatcttttgatggaattatagtacatatacagacaagtgtacaaaccatatgtgtacctcagtacagtttcacaaagtgaacacatttgtgcagccatcaagaaatagaacatttctagcaactgaaagccccctcttgctctcttccagtccacatccttctctccaagagtaaccactagcctaacttccaatactctagttttagttttatcttttttttgagttttacataaatgagaccatacattattattatttttttattttagagacgggatcttgttctgtcactcaggcttgagtggagtggtacagtcttagctcattgtagcttcaaactctttgataatattttttatttgtgccttatttctcttctctcttcttggttagtcatgtcaggggtttatttctgtttcagagaatcagcttttgggtttgttaatgctcttagttgtgtttttgctattttaaaagtttctgctctaaatttttattttctttctgtgtttcaagtttattgttgacttattttctcttgacttaattcgtcacttaccacaatcattctagtcatttaaaaaaatagaagcatttgagatgtacatttttttttgaatttcacttaagctgcatcctacaagtattgatatgtaggtagcgtcttcaaaatatttaaaaaaaaaaatttgaccagtgtttaatgtgcttgaaaatgtgccgattttaagcatttttttaggccgggtgcgctggctcacacctataatgccatcactttgggaggccaaggcaggtggatcacctgagatcaggagttcaagaccagcctggccaacatgttgaaaccctgtctctactaattatacaaaacttagccggccgtggtggcacatatctgtaatcgcagctactcgggaggctgaggcaggagaatcgcttgaacctgggaggtggaggttgtagtgagccgagactgtgccattctgttccagcctgggcgacaagagtgaaactccatctaataaaataaaataaaataaaaaataaagttttttttaaagtttcttaattccatggtgatcagagcataatctataagttattaattacttggtatttgttgagactttatttgtggctaggtatgagggattttagaaaataaatgtttcatgtgtgctcgaaaagaatgtgttgtctctgtattttaggtgcaggcttctacatatgtccattggatcaaacttttttatagcattgtttgaatcttactaattttttgtaaaatggtttatcagctactggatgtgttttattaaatctgctatttcatttgcggattatccatttcttgtaattcagtaaattttttgttttgaagctgtactattggatatgtgtagatttagaattagccatggttttcaacccacaactaattttgaacttcttgttttaggttcatgctttaaatatccttagagcattgttcagagatacgcgcctgggagaaaatattattccttatgttgctgatggagctaaggctgcaattctgggttttacatcaccggtctgggcagtaagtgctgtcactatttattttcattgatttaattatgcttctgagtaggttttaataaactaatctttcactgggtgataaaaaatatttcctgccctttaccatgaattttcttagaaatctttggatcaagctacatttttgattcttgatatttcatggttccattttcactcatttgttggcttgttagccatctttcttttttttttaattttattgattgctttagggtttacagtatgtatgtttgactgatcacagactactctcaagtgatattacaccatgtcacttaaagtataagaacttaataatagtgcacttctgtttctctcctcccaatctatgtgctgttattgttacacattttacttttatgtgtgttgtaaacttacactacattgttgttatttttctttaaatagccagttatatttcttttcaatttaccactttaaccgtttttttaagtatatacaatgcagtggcattatgtgcattcacaacaacatttatcagcactgtgcatttctggaacattttcatcatcccgagcagaagctctgtactcattaaacactaactcccatctctcatctccctcacccctagtaacctctattctcctttctgtctctgtggatttgcctggtctaatacctcatataaatggaatcgtacaatatttgtccttatgttattggcttctttcatgtagtatatgaagggttgatccatactgtgtggggtggggggctgtgtgtgtatattggtttatcagtatacacacatcccacattttctttttttaatttttatttaagttccaggatacatgtgtagaatgtgcaggttttttacatagatataagcgtgccatggtggtttgctgcacctaccaacctgtcatctagttttttgtttgtttgtttgtttttaattgagttggagtcttgctctgtcacccaggctggagtgcagtggtgtgatctcagctcactgcaacctctgcttcctgggttcaagtgattcttttgcctcagcctcccgagtagctgggactacaagtggatgccaccacacccagctaatttttgtatttttggtagagagagggtttcactatgttagccaggctggtctcgaactcctgacctcgtgatctgcccaccttggcctcccaaagtgttgggattacaggcatgagccataacgctcagcctgtcatctaggttttaagcccggcatgcattagctatttgtcctgatgttctccctcccttcctgactccaacaggccctggtgtgtgttgttcccctttctgtgtctatgtgttctcactgttcagctcccaattatgagtgaggacatgcagtgtttggttttctgttcctgtgttagtttgctgaggatgatggcttctagcctcatccatgtccctgcaaaggacatgatctcattcctttttatggctgaatagtattccatggtgtatatgtactacattttctttatccagtctatcattgatgggcatttggtttgggtccatgtctttgctattgtaaatagtgctgcaataaacatatgtttcatatatctttatagtcgaatgatttatattcctttgggtatatatccagtaatggcattgttgggtcaaatggtatttctggttctagatccttgaggaatcaccacactgtcttccacagtggttgaactaatttacatttccaccaacagtgtaaaagttttcctatttctccacagccttaccagcatctgttgtttcttgactttttagtaatcaccattctgactggcgtgagatggtatctcattgtggttttgatttgtatttctctaatcatcagtgatgttgaactaccacattttctttatccaaattcatctgttgatggacgtttaggttgtttccactttttggctattatgaataatgctgcaatgaattataatgtataaattatctgagtcattttagttcttttgggtatatcatatggtaattccatgtttaactttttgaggaatgaacaaacttcttccccagcagcagcaccattttatactcccatcagccatgcacaagttccagtttgtttagatctttaccaatactcgttatctttttttttttgataatagccatcttaatgggtgtgaagtggcatctcattctgattttgatttgcatttccctaatgattaattatgttgatctggaaacaaaacaactctgagcgtataaatgtgtctgtattttggatgctgtggactctgctgttagtatgttaagttagtgctacaaataaactctatcaaaagtttgaaaaaacgagacactcgcaaaacattgaaatggaagaggttaaatactgagtcgcattttcttttgtaatatgttcactgtccagaagcattttgattcaaaactttaaagataatgggcaatacccagtacaattgttggatttaagaaagtaatttttcgtgtgttttcttatgatttctgggagaaacattatagtttgttttcctatatcatgtcttctagagtaaggagaataattatagatgcttgaaatgtggcttaaagtaaaaagtctggcaaagggagaagagaaaagaagctagatcttaatacattacctgcagagtggagtatttactagaaagtcaggctttccagttagtaagctgcacaaaccatttcttacctgtatgataagcctctaattgagagtaagtattttgcagtgaaagccaaaggcacagactcccattgtgaagaggaatcctttgaggttgccaactcttgcctagaaaattgtgcgtcttcctgtaagagatacacacttctggaattctgtctaagagcattgcataactactcttgaggacacagagtttaccttttatacttacaggaagtagagcaatgcctttatactgtcagtagagtcagagaggtaggaatgtggcttgaccatcaggaatactggagatcataaaagtgattgtcagaaatatcaatattgctttcttgaagccattagttccagatgaaccaagaaatattttccgtgaaaggactttctgagagtgaagcctggtgattcgtccaactttttagtaaaattcaaactatcagaaatgagtgattcattttttttttgaaaagactattttttgagaccctaaacagtaatacatgtgcactgcagaaattttgaaaataaagaaaagcataataagaacagtaaaagtcacctgttaaattaccgtacagatatgagcattctgattcattttctttctctttttttatgtgtgggctttacatgtgcatagtacatgtatgcatacatatccacaaaaggctgcataaatatatataaatgtttttattttctttctaatttcataatactaataattttatttcttgggatcttcctttttaacactttatgaaggaaacatttctatttagtttgctttactagaggaaataaatatcatagctataatgatcaacactgttacttaatattatcaatggttatattttcttctgtataaaaatctaagataaaatttatgagtcaacctatttaatggatgtgaagaagtattcacttacaaaaacaatttacaaaagcattctctgttgaagtgattttaagtgtgatttttccttaatgcatacgaaatacggtttgatttgcagaactttgatttgtacacatcctcttgggaatataactgtgcctaaagctggctacatctgtacttttgacttgattgtttttcctgataagttagggaaaacacacatgtaaaatgaacttaattttaacttgcagtaaagaaacatttttcagaaagcattcatgtatatatttaatttgtttttacagactccttagtctttcgtattgaaaccatacagatctctcaaactttgctacctagtaggcattcttaaaatatagggaaatgtagtatgtaaatattttcggcattagacatatctgcttactgtattgtagatgttatgttaagcactagaaatacaaggatagataacacataatcataataatggctgtcttattgagtatttctcatgtacctggcataatttacattgcattgattatcttagtagcttctgttatccaggtatgttctgttataatcctcattttacagatgaagaaaacaaggctcagagagatgaaataactctgcctaaggacacaaaactattacctgtccaactccagaatgtgtgctattgtagaggagatgtttgggtattttaagaatacaaagaaggtacattttacctaccttctagggttttggccctattttcttattaaacagagctggaagtaaagcccgggtcctaacattttattgagtggtactaaccaagaccagcaggaatgaaagaaaaagggaagtgaggcaaggaaagatgaatgatattaccaagggaaccttaaccttgcagaaaatctgagctggttgtcttgtacatggtgcatcttctagccagaccatgtgaaactaccaccttttggaacagcccaatatgtttgtcttttactggtcaaagttcatccttggggcattaccacaatttgggcaggtgttggcacaacccttgggcagctgctagggaagccagatcgcatgtccagtgatgtggcatctcatctgagtctgaaagtggctggatgaaccagagcttccatggatatagttggaacagacctgaggtttgaaataatgacttctactgtgttgaaaagctctgcatgaaagaaatttatagcaggggagtcatgggatgtgattgatgtaggtaaaagtggagacttgattgtaagatagcaagagggaaggaagaagaccagtcaggaagctattgtaatagttctaccaaaagatggtggtggctcagcaaagatggggaaaagtgatagtctttaacatattatttatattaaaaatatttcagagattaaaccaaccagtttagttaacaatctaagttaacagaaagtaatttgtggaacccgagaatttactaggcagtttttgtttaaaaatatcactcatctctctttattatgttcagtgactaggggaggcctgatcttctttccttgcatcctcatcctcattgcagaacaggcaattctcggctttcccagtggagcccgcccaaaaaactccactgagtatgccacttagagtctttctaagacccacactgggtttatttttattttggacggagtcttgctctgtcgccaggctggagtgcagtggcataatctcatctcactgcaacctctgcctcccgggttcaagcgattctcctgcctcagcctcactagtagctgggactacaggcgcatgctaccacgcccagctaattcttgtatttttagtagagacggggtttcaccatgttggctagaatggtctcaatctcttgacctcgtgatccacccgccttgtcctcccagattgctggaattacaggtgtgagccactgcgcctggcctatatttttatctggtgtatatttagcttgcttcccccagggtaatctggttcatagcatgcagtgggtttcaaaggagggtaggaaaaagatcctgttagatctgcccagtagtgctgccatgccatggctactctgtgcctctgttggcaccagcatctccaggccctctgataattatgaggttgccacaagggtgctacactgagagctgtgtactgctgaaacctagctgtgctctattcactgtgccgcgtgccttggcatggagcttcattgacctagaggaagagggaccttttttctaattcactcatatgtactatatgggctagtttaaaccctgtctcttcttttgtctgctcataggtgaagtgtcttgctactttggaagagggtcaccagaaactctaggacatggctggccctccctttaatcataggcccagaaatcccagcacagttttcctggattacagatgatagacttgtgacccaaagttttaactgtcttttcatggtcacatggctaagaagtgatggaaggcgaattagaacccaaatctcatttagttttctcagaaaatatttttttctgctaccacgtacacaagacaaaatattaagtgtcatgtgtggatcccatccttaagaaattgactgcctattaaggatagggtgtgtggtgtgtaaatgaccatattacatagcaattgcacatagtaggctgtccattcatacttttcaaatatttttcaagggagcatttctattatataagaaaagctatatacatagataagaaaaatatacacatatatacatgtgcacacacacacacagaaggctttgtgtaacccagttttaattaccaaactgttctgtattttttttttttttttgagacagagtctcactgtgttgcccaggcttgagtgcagtggcgccatcttggctcactgcaacctccacctcccaggttcaagtgattctcctgcctcagcctcctgagtagctgggattacaggcgcccgccaccaagtccagctaatttttgtatttttagtagagatggggtttcaccatgtcggccaggctggtctcgaactcctgacctcaagcaatccatctgcctcggcctcccaaagtgctgggattacaggtgtaagctactgcacccagcctcttctgtatcttaaacgagtctacatgaaagctttttcatgcaagaaaggaaagaaaaagttatacactctgtgaatagaagagaaaaattttggtaacagttgtcagtttgcagttgaattccaagttcctatcaaccatgtatttagggcttgatggagaaggaggtcaggagcaggaagtgcttccctcgtgagaaggatagattttagctgggattaaagtcatgcattacttaatgacaggaattaattctgagaaatctgttgtttgggaatttcattgttgtgtgaacatcatattgtatacatgcacaaacctagatgtatagcctactccacacctaggttgtatgatatagcttattattcctaggctacaaactgtacagcatgctatcatactgagtatgctaccatgctgagtatgtaggcatttgtaacacagtgttaattatttgtatgtctaaacatagaaaaagtacagtaaaaatacaatattataatcgtatgggactatcattacatatgtggtccattgttgaccacagcatcattttgtggttcattacagctattatcatttctccatttttagctgtactactgcttacccttttctgtctttactctcctttttacttattaatggcaataactgcggttacttttgcaccaacctaatgtgttttccatctatccttccaaaaagggacatgttttattgccaatactactaatgtattactcacattaagattgctatcaatgattcatattagcatttattgtcagtgaattaggagttgataatgtagtttgttagtcacaacctctttctcaattctttgtctacttcagtttcctccttgttagctttatttatagtggatgggaacagaaaatatggatgaaatagtaaaacatacaaagcaatacctgaaacagatatccttgaaccattcatactgtcacacagaaatctaggggacactcttctgtcttaagtaggaagtaggctttcatgccagttattttgctctatatttacaataactcttttaagtgttgttctgtataacttacagaattctaaaacagagtatgtatttttcaacctataaaaatcaattacagtactcccctcctcaaatttgaggaggatgcattccaagacccccagtggatgcctgaaaccatggttagtactaaaccctatggattctgttttttcctatacatacatacctgtgataaagtttaatttataaattagatatcataagagataacaattataacaatagaccataataaaagttaagtgaatgtgattgctctcaaaatacgttagtgtactataccacaggtaactgaaaccacagaaagcaaaactgctaatgagggaggaccattgtaatgtaatatactgtgtgaatagactaaagaacaaaacccacattattaagcagatacaaaagaggcatttgacaaaatctaatgctattttatgtgaaaaaaaactaagaatggaagggaaatttctcaacctcagtggaaaatccagagtcaacaatatacttgatggtaaaggactgaaatctttctctctaaaatcaggaacaagacaaggaaatccactcttgtcactcctattcaacattgtactggagttcctagtaggccaactagagaagaataaaaaataaaagttatccagtaaaggaagatgcaaaactatctctattttctgatgacatgatcttaaatatagaaaaatcctaaggaatccacacacatgcaaattaaagcttgtctattagcaaggtttcaggacaaaaggtcatcatacagaaattgtacactagcagtgaaaaatctaaatgaaattaagaaaacagtttcatttatgatagcatcaaaaagaataaaatacttaggaataaatttagcaaaggaactgcaagagttgttcactgaaaattatcaaacattttttgaagaaattataggcctaaataaatggaaagatctcctgtgttcatcactggaagacttaactattgttaagatgacgtattccccaaattaattaatctatagattcagcacaacctctgttaaatcccttctagcttttttttttttttttttttgcagatcttaaaatacatatggaaatgtgagggacccataatagccaaaacaatcttgaaaaagaacaaagttggaggccccacaggtcccaatttcaaaacttaatgcaaagcaacagtaaattagagcttgtggcattgacataaggttaggcacataaatcagcagattaggattgattgtacagaaataaacccccacatttaataaaggtgccaagacaattcagtagagaaagaatagccttcaacaaatggtacggggacaactggatatccacatgcaaaagaatgaatgtgatccccatctcataccatattcagatgactcaaaatgtcttaaaaacctaaatgtaaaagctaaaactataaaacttgtagaagaggacctgggtaaatttttgtaccttggattagataacatttagttagatatgacacctaaggtacaagcaatacaaaaattgataaattagactgggaatgaaaaaaactgataaattagactcgatcaaaattaaaaatgtctggctgggcatagtgacatgcacctgtagtcccagctactcggaaggctgcagctggaggattgtttgagcccaggaattcaaggctgcagtgagctatgattacaccactgcactccatcctgggcgacagagcaagaagctgtcttagaaaagttaaaaaaaattttttttaaataaagcttaaccagcatcaagaaaaaaaatgtttttcaaaggacacaatcaagaaagtataaagacaacccacagaatgggagaaaatatttgcgtattatacatctgataagagtggagtgtccagaatatataaagaactcttataactcaataataaacgacaacccaattttaaaatggacaaagaatatttatctccaaaaaagataggcagatggccagtaagcacacaaaaggatacttaacaccattagtcatgagggaaatgctacaatgagttaccattccatgcccactaaaataaaatgcatggaaaataactagtattagggaggatgtggagaaattggagaactggtgaaattggaacgctaatacattgccagtgagactatgaaatggtgctaccactttggcagttcttttgaaggttaaacatagagttactctgtgaccaagcaatactacttctaggtatatagtcatgagaaatgaaaacatgttcacacaaaaacttgtacatgaatattcttagcaaaattattcataatattccaaattggaaatagcccaaatgtccgtcaaatgaagaacagattttaaaaatacggtatatctgtacaatgggatattattaagccataaaaaaggaataacatactgatacatgctacaacatgggggaaccttgagaacattatgctaggtgaaagaagccaaacattaaaggccgcatactacatgatcccatgtatatgaagtatccagaaaaggcaagtttatagagacacaaagtagattgtgctttcctactgcaggagaatagggagtgacgactaacggctcccgagtttcattttgaggtaatgaaaatattgtggaatttggttagtggtgatagcttcacactttgttaatatagcaaaaaccactgaatagcatcctttaaaataataaattttatatgtgaattatacctcaatttaaaaaagtaatttaaaagtgattttaaaacaatcatgcagtcacctttggaggttggtatggcatgaactaattattctgaaaatgatcaatatatggaaataattctttactaactgatgaacagggtaaccaaatagcagatgaggaaaaactttaaaaaaataaagtttttctgaggatgtaaatgattaatgcagaaggcctatagaatatcgtgattttgctgcacctaatggaaaatgtaatgatcatcattgatcgctaatgagggcactttataagggatatcttagtcccttcgggctgctataacaaaataccacaaatttatttcccacagtttggaggctggaaagtccaagatcaatatggtggcagattcagtgtctggtgaaggcctactttctggttcatagatagcaccttttagctgtgtcctcacatggtagaagtgaggcagctcactggggcctcttttataagggcactaatcgcattcgtgagagctctacccccatgacttaattatttcccaagggcctccaccacctaactccttggaggttagaatttcaacatgtgaatttttggggaacacaaatattcagaccatatcaggatggatcaggcagataggattagaactgtctggtccatcttaatattactaaaaagacatgtgtctcctgccgtcagtctattgaatcaaaggagttttgtttcagagggtatccattcactttgtaaaatagtcctctacagttttgtttaaggtgtgcatttctcaacatctccaggcactcctgttttaattttactgcatctggcagcctttgtcagaaagtatggcttagggcaagatggagtctgtgtttctgttttccttttctttttgtgtttttgtgtgatttctgagaggagagaaggtcccagatatctttaccaagtcatcttagacctaaaagtctttgggaactacctcactagatcaggtagaagataatccagacctgaatgagggcagagattatattgataaagtaacagcatggattgatttgttatttggggattaaattaggcagggcacatagtagggcctccttggatgtttgatggctgttgaatgaacgtaagtgaatctgttcagttttagggttttattgcatttttgatatggattgtgccagtatatctgtaaagttcacttctatggctaccatgcatgacttgagtcagttctgggcttctagaggagaggttacaaactggtggccagtaggacaaactagcctaccactgttttatttggctttcatggtgtttggttctttttttcctttaatttcctgccagcatttcaaaatagatttcacataaaaaccagggttcctggcttctcttgaaaaagcagatgatctggcaaaactggacttatatttcctcatggcagcaactcagctgacactgactgcattagaccaagtccactgctgcctgtgtcactcacttttcctgtgagcatttgagcttgtgactctaagggcattgctttcaggaagctgttttctaaatcttaacgttacttttagtgatctttctacttatattgctatttaacacaccatgtggttatgtcacttacttaattagagtataaggtctgtaataccagtaagtatgtgttttctgtttctggatcttatccatggtgctggtatagggccttacacactgtagcaaggtgagtacatatatatctctacaccgatttttacagagtaattgaggaagcctatagtgccaaaacagtcaagacccttttatgctcttccaaagcatcttgacacattggtttggaaaagatagggaaaagattattatcatcttggagaaataatttgtgtttattcatggtaattcctgcctcttatctttactaatgttatcagttaatttcagtattgaaattacttggtaagttacttgcattgtgaagctgataagcaacattttggatttaactattttcttagccatattaattacctggattctttgaagttaggatttttggattttctttttgtttttttaaagacaggttctcactcttttgcccaggctggagcacagtggcacaatcatagcttactgcagcctcaaactcctggccttatgcaatcctcctgcctgagccttctgactacctgggactataggcatgtgccatggctgtaaaaataacaacaacaacaaaaagtcaaaagcaaaacaaacaaaaaaatctctaaaaaaatacttttttttttttttgagatgggggtcttactgtattgcccaggctggtctcaaactcctggcctcaagcagtccttccactttagcctcccaagtagctgggattacaggtgtaagccactgggcctggttctttgaagttaggttttataagtattttctcgtaggtaaaatgatttcagaaaataaatggaaagagctgaggttttactgcaatcttcattgtcaggaagcatatagaaaaatgaatttttagaaaagtgttatttgatgctctaagtgcagagattagtgaaaactgttgatggtaatattaggaatataggaaaaggctgtgttgtgtgcatgtgattgggttgtagagctcaattgaagtcattgaatcgatgactgtcaagttttttttttaaattattttatgaacacaaatctgtctttttagcctcacactagccagttaggtaatgattttgaattatctagtttgaacattgtaaacgttggtttcatgccaagaatatttaagccttattgtgttttcgtttgtacattaggtgcgaaattcatccacacttctctttagtgccttgatcacaagaatttttggagttaaaagggcaaaggatgaacattccaaaacaaataggtaagctccatttaaggctaactttactttttttaaaaaatacaatattgtcctggccaaaaacaaattttgaaattgtgcctactgttatagattcatctagagcataaaactataaaaatactgtaatgaattaacctatgctgccaagttataaacccttgggcaaaaatatcaactgtttaataagtggacctttcaaagcaacaaaaatttagcaaggtagcaaggggtgaaatgtagagcttgtttctccatgcaaaagctagtgttttttttgtttttttttttttaattgcatcttctttaagtagtcctgaaatgtcttaactttacttgtatatattatcctagcttgtataatatctttaattttataggtggaagtttaaatgtttatgatcctctcattagaacatctctcacattacctttgcattaaactcttgtactaagaggagcacctatatgtgttaaccacaagaaataaacagtgctttttacttttggtctttagttttatgtttaacctctaatttgtttttgtctttaaaaaacagcttttttgttatgcctgaaaagaaacctgtggaaccattttgattttgggtagtttttagataaaaatgcacaagatctgtttgtttttaaagaagaaaagctttgaatagttgttttttagcacttaagaggatttaatggtaatctaattgacttgcagttgttaacactagatgtcactgttgctgcacatttaattacttccttaactttatttaggatccagtttggcccagtggtctttctcttgaggatctagagttatattcaaagccctattcccttcttccctaaaaaagtcattatgcttcatatttaagttttaagctaatgtttattgaaatgcatttttgtgtgatggaactaaatcttaggaattaaaaaaatatgaaatcattttgtgatgtactagtgataattctaatgaaacctactatggtatttccgaattatcatttaaattgcttcttgtcaccctgtaacattcaccagatatttaaaaggaaggtaactggctgtaagtataaatcccttgagcatgttcaggcaataccagagagctttttaattttttttttaactgagtattttttaaataaataaaacattactcttgtggagggatgattataatttttattttttagcctgttcttaaagaaattcttcctgtcactaacttgaaatcactaatatttgtttctccttagctttgtctattttgttaataattctccagtgtgctacagtttaaaacagttgggtcatgttataaggccttgataaatactggtataaatgaaatatgatattaagtcatcaaacaagtaaaattaatgtttaaaactgaacttgaagaaaatttttttttgttttttatgaagtgattcttgaatatatatataaatatatatacattttactatgtataggagaaaatgatcagaaaatgagaaaacctcatttaggttgtatctgagggaggaagaatagggcagtgatactatacaattttaattttttgccaaagttacaatgatggaaacctccattataaatttattcctcttggataggaaagattacaaaatatataagatttctagaaaaaaggaaataggaatgagaagtttttaactgtgaagaatgtgagagcttttaattttagtaatctgaagatcggtatggaccattatgtgtacaaggcttctgttccctgtttaacccatgaagatatatttcttggcagctcccattaggtttgctttgcaaaacctttagtgtcttaaatttgcagttgcttgtgatggttcttttagttttagtttgtttaattatgtcactttttgtttaaatgtttatatgcctgttccttccaatattaactttctgaaggaaggacctttttcatctgttctgggtacgtaatgggcactttaagaaggctagtaataatgatatcttggttggttacttatccaccggataactaacctcagccggtgacacacctcacaagtcagttgtttcctttcacaaccacagattgtcctgctcgcaatttggaaatgtgtgttcttggtcagagggaactggacataaaaagaacatctgctttttccatctaatgggaaataaaggtctgacttggagtaaacaaacctggtttctaggcattttgctgccactggagatgaccttaataggcccccttatccactttgcacttcagtttctccatctatataccaggaataataagatctgtgctgtctactcctagggctattgtgaggataaaacaaactattagaagttcattttctttaacatattggaagtcctaggcaattagagatatagtttggtttttctttctgttaccacttctgtgattgtactcatctgattgtcttgctcttaagaccgtgctttttgaggacaaggtcagtatcttaaccattcttgggtacctagagtctagcatagtatctggcatatagaaggcatataggaataattgcctaatgaataagtaaattttgttactagaggagaaataagaaatctggtttctactcctgcgtttgttacaatataaccactataatcaactgagacaaaatagccaacctctctgggctttggttttcttctctgtaaaataaggtttggaatattcctgaggtcttttctttttttaaaatactaaagtaaggctttacataatgttactggaattgtaagtttggtaaaatgatgtattcccagtgccgtagaacagtccctgtcgcatagtacagacaagaagttcctgtttcatatataaagaaaggagcagaggatcctttgtaagtgtgtagagggtacctgtaatgactgaatttttgcacccattagtcttattttagatgtgttttttgggttttaaagaatgagaaaacagaagtttcacttgtgcttttaaagtaatattattacattttaacttttaaagctcttttcctttctgtttattgctgcgtgactgacttggcctgacagaatgaagaactgattttatgtaaaatcagaaccagcaaagctctgcaacctgtgcaatatgcatgttttctaaaatagcctccatctccatgtgagtgagctcagcttcatagctcctcatttcttacaggacaggagctaaactaatatggcgcttagctctaggtctttccttttagcccctgtgtgtattaactttcagctgtgagtcccagctaaatgatacatgtcaatatgtagcaatcagaaaaggtttatttttgacttcttggagtgtgctttgccaaagcttcatgcaggttcttaatgtatagcattgtctagcttttgcacactctccaccttaaatcagtgagccaatgagaatttgaaagcacttatcatgaactcagtattaacataataggggagtacatgaagaatataaaacttggatcttactcaaggagtttacagttcagttaggaagacaaaaattgttacatgtgagtcagatacaaataggagacaccatataaaaatcacctgtacaatgtgatgtgagtgatgaacacattagaaatttataaatggtagaattgagtggagtatatgttggggggaagtagtattttttacaaggcattgggaaatgagtagatttggggtacatggaaacaggtagattgaaagaggaacaaaataatagttttgtttactgtgttaagtacaatctctattctgtcttattaaagagagctcatattcaaattaatagcttaggataatttagtacaatttaagaagaaaatgtgtttctaaaatcatgggatgatccaagtaaaattgtttctagtgactatgttgggagatgttaaattgtatttattttattttccagggtataagtgatagagaattattttagttatttttcttagcattttagtggtgtaggtctggaaggatccttcaaggggcatctaatccagtccagcatcgtgcttatagagagattttgaagcaatttccagacagactggcttctctcctgttcttcatgttttctaggaaaagagattccacaagtttctgtggttacccacgctattgtttgggaaagaattgaattctcaaaactaaaattgaaagctgcagggcaattgggttttcatattttagagaatgtaattattagaattcagaatagcttatttgcttcgaactacatagtaacttgtagcaagccctatttggccaaattgaaaaacagaattttcttttgactgtggccggggtaatttttttttcttttttttttttttcccccccaagacagagtctcgcactgttgcctgggctggagttgaatggcaggatctcaactcactgcaacctctgcctcccgggttcacgcaattctcctgcctcagcctcccgagtagctgggattacaggtgcacactaccacacctggctaattttttgaaattttttttttttagtagaaatggggtttcactacattggccagattagtcttgaactcctgaccttgtgatcgcctgcctcagcctcccaaagtgctgggattataggcgtgagcggccagggtaatattaacatcctcaaacccaaacagttctaattttctccactgaacaagcatttattatgtttttactctgggccaggccctctgctagttactgggatccaaagataaatcagaaatactctctgccctaggggactccaagtctgatgaagaatatggcagttatctgtggtgctggagtctctgttcagttgtgtagaaggacaggagaagttgtgaaggaaggtaacatttctttagtgcgtgggccatgccagaccctttatacatgtctaacttagccgagatcacagctctgcgaggtaggcagtatcatcctcatttcacagaagagggacctaaggctcatgaggtttagctacttgcctgtggccatacagccagaaagtggcagaactagaacacaaagcgagctccatctgcagagcacatgctgttacacaccaaacaacggattccctcatgggcagggtgtcacctttttggagttggctttagattttattttgtcagactctttgggaaattagccacttcacccaaagtctgaatgttgaccaataatctcaaatctcccacatagtaggttgattttagcaggaaaggtaggagtaaaccagaggagaattttgttttgggttgactttaagattctttatctggacggtaaaagacaataaggatgtgtattttttggtgcatgaatgttatttacctcaatgagcccctcgctgttctcatgtagacagaggtgagggaggagaggagcaaggctcaaggtttctaatgtcaaccgggaatgtcgtaaaactatgaaggtagaaatcttagttttctggttagaaagtagagaatgaatgaaattaccccaataaggatatcagtgttgctagcaagaagttaactttttttttttttaacatttatctctataaaactcttatgtttgataatagtttggtgctattgatagaggattttgaggcttatgataattcttatgatttctctagacttaactctttctctagagtgtgtgcttatgtctttcattgatatctttaattaaaatgatactaataaccattattattatttgtttttatctttgagaggacctaggaagtcatccagtctcattctcattttgcagatctgaaaattgaggtgcagaaaagttaagcaatttgtgtaaggtcacagagctagtgctggtgatagaatttaatggttatttttagttcacaataagctcaactaaaacattttaaaaaatcagtcgattatttagaaatgaagtttctgttagcaacagtaatagtagtttggattcagatgattctgatttaaagtatgaagttaattttctcaaagaggtgctttaattatcataagattataaatattaatgatttgaaagtaagttaagagctctagtgttttggtatagtctggagtgtcattcatgcattttccagagttgtttgtagaattaacattcaatcatttatctactctttaggcagagtagataaatgagtatttttggagactgagaggtaaagtacaagttttgtgtaaccctggttgagatgttcctaaagtcagaattaagtctgtactgacactttggcctattagagagtttcatgtttcaagtttttgttcattcttaggttcatagattacaggtaggagaaccacaaataaagtttttaactgaaaagaagttcttcaaaagaaatgttttcatgaacttgaagtgggaattagtcattgtgttcttaaatattgactcttacgtggacgaagtaatctttatttctaagtactgcttcaggctattgccttctttaataactaaggcattgttgctttagtttgagcatgttctatggaattttggcaatgcatgtatcctctttctgcatcttagtaaaagcatgagtaaatattttttcttagctttggtatttttgtagcttacattttatatgggccagactaatataatgtaataccaggattacataatttaagacgtcaggattgcttccaggagtatgagataaagtcttcatttatcagggggtttacaagcagtatttcttgccccttcaatacctgtagagcaataccactgagctattttccaaatgagaaaatggagtctaagaggttaaagccagagggaacagtttctttagaacttggataatatttctttattcagaacttggtccttgtaactactgatttgagtaatgtacagtttggaaatctcaggaatttccagctattgttgttatacattgaacttttaaataaaatatactcttaattttttcattgaatactccttatggaccttggcatcctggtatatacaaaagtagtttataacatgtctgagatttcaaggagtttaccatttattgagaggtaagaccaacatggaaactagtttaggaaatgtgagaatcaaactctctggcactgactgtcaggggataagaggtcagaggaggatgaggccattctccatgtagcagtctgggttgaatccggacttgaaaggatggtcaggatttcaataggtagagaagagggtgttgcatatgggatcatgtaacataaacagagatgtagaagttggaacacacattgtacatgtctaagaaaattaaaagatgaatcagatgaggaaagagaggacatgtggaagtgttcattcagtcattcattcctagagcaaggattcatggtcacttagtctgcataggcactgtagtaggttctgagactatcagtgagtgtggaaaacagacatgtcaggagactagtttgaattttacagaacattgggattcatttagaagtctttgtatcagagtattctgtgataaaaccattgctttaggaattatttgagaagtgattgcattctgtaccactggctggtgggcatggagaatgtgatgcaaggccttgaaagggagtgccacttctaaattgagtagcagctatgttaatggggaatatatgtcctatgttttaacgaatactagttttctcaagaaattaagagatgtttagtgaaaaatagatttttctgttattcactgactagaaatgctgaattaaataatgacaggtttctcagacctgtgctataatgtgttttgagaatcatcaagagtgggatatagcatgcagtatgagcatttccctaaattatttgaccatggagattctctctcttcccttctctctctctctctctctctcaaagaacatatattgccattttttttccatccaacagtttggggaatactgctgtcgggatactgattaaagcaggtgaaaggcatatttctgattattaggagcagtagatatatctactgtgagaaagacatatatatttgagatatatcttggcagcaacagaaaggattagttttagttacagctaaatacactgtaaattatcccacattgtcagataaaaatgtaaaatagcgtcctacatatagtaggtagtcaatacatttgaatctaggaaaatttcataattgtagacctttaaaaattctataataaccaaaatgcctctttgagagaatgaactttatattctaggttagaatcttctaacattttgtcagaagaacataatttccattttcccaatgatttgaccattagtatggggaagatagtgcctataatacagttggtgaactgatcagcaagattagtacctaacttgcatgactgtgatatatgtatctgtttgtggggtgggtgaagagtgccgacagggagaacgacataacatagtaaccagctttgaaatacagtcttgctagtaaattaagtagcacactctgttgttgtcattcctaatccccacagtaatagcaccgtctgttaacatttacccagaggcttgaaataattcagacttatgcagctagaatccttttggctgcgaataacagtaaacccaaatcaaaatttaaatacagacaacttactatcccatatataaccaggaaattttaaagaggattgattcttttgaggttgaaaacatcatcagagactccgatttcccttcttgtttctgctgtgccatccttgatgtgatgccatgagccccaggcaagcttccttcatggttgcaagatggcttcagttccagccatcatatccagacactgcagtgtctaggcacaatacccagtggccttgtgcatttctgtttctttttaagagcaacagcatttcctcctgtttatgttcccatgttcccacctccacactctacacacttttcttcatatcttgttggccagagttaacatcttagcatggcccagcttatccctggtgatagaaatagatccactataattagactaataggattcatcagttgggtctggggttggtgctggtcctccccgaagcacgtgactactcagaagggtgaatacccaaccaaaatcagttctgttaagaggaaggatgagatagaggaataaatattgattaggcaactaatcatgtgtgctactacattcttctaggctatctgaaaagctctgaaaatgtttgtgttaagaacagtgacttaagactatgtatgtagtattttagcttaataggaaaatatgtttttcttttatgtattttctttatgtaattattaaaagatgtgaagtagtacaagtgtctagatatatgattccataaaattcattcctgtaagcagcttgcattataaaaatctcacccaggaacaaagtgtgtgtctttacacatgactttactaagttttgtagaacgttaaaatagagattctgagtagaatgtaatcagttcctaaccacgaaaatgctattctgcaatatgaaatgtctccctggttcagagctaatctctaacaagctaacagaatgttaacattgttttttaatataaactctaattcactttcgaatttcacctctatattatcacattgattttcttcttgtaaggccaaataatgtgaagtcaaatagtctttctaggttttttttttttttttttttttttaagacagggcctagctctgtcgcccaggctggagtgcagtggctggcacaaccttggctcactgcaacctctgcctgctgggctcaagccatcctcccgccgcctcaacctcccaagtagctggggctacacgtgcgtgacaccatgcctggctaatttttgtattctttgtagagaccgggtttcgccatttgcccaggctggtctcaaattcctgagctcaagtgatccacccacctcagcctcccaaagtgataggattacaggtgtgagccaccatgcccagccgtctttctaaatttgttgggattattaattatttttatttatgaaccaagtgttttgatgtaacttcttggtctctgaactcaacttaggtcagttgtcctgaacaatctctctttctctgtttgctacgtttctttcttttctgtcctctaaactctaaatgtttttttcagcatatactgcctctatagaagtggtccatgaggcggtctgggtcagggcagaccgctcaggcttagtagaagacggggtcagactaacttctcttgagaaagaaacaggttactaaatcttggagggctagaattttccactctataaacacaattctagaagcatctaatactcttcagacatcttcatctttcttttatttatctctatgatcactcaaattctgaatacctgaagttgatttagatacatataaatggtcaattgcatacttccctccttcaattcacttgatttcttcttttgccccctataagcaaagccttcttatgccgctggttccattttctatgattagtgtcctgtttagatgattcaacattttttttcttcatcattcattcagcacagacgtttgcaaggttcaaggatctgagtactaaggggagtacagacatttataaaatatggtcgaaatctttggggaagagtggaggaggagagataacacttgaactcggctgtaaacgtaactctaaaacaaagtggaaagctgtcagtactctgtgaactcctttcctctctctcaggggaagagcctgcatgttccactcctcccatttcctcacttcagcttcactgtgtaattgtacctggaacagagctctttctcacagtcttaaaacacacatcctctttaaacccccatctctttaattcttcttccattaaggtgagaaaatgtcatctatttctgtatctttcttccttcttttgctctatccatatgacactaagtgattcaggtcatggtttacaaacacagagcagtattgatgatatgcctctcctacctgtacagtcatgccccacataacatttcagtcaatgacagaccacatatatgacgatggttccataagattatagtggagctgaaaaattcctatcccctatgatgtctcagcacaatgtgttagtcgcatgtttgtggtgatgctggtgtaaaacctacctctgctgtgctgtcagttgtataaaagtcaagcatgggccgggcgcggtggctcacacccgtaatccctgtaatctgggaggccgaggcagatggatcacctgaggtcaggagtctgagaccagcctggccaacatggtgaaacctcgtctctactaaaaatacaaaaattagctgggtgtggtggcaggcgcctgtaatcccagctactcgggaggctgaggcaggagaatcgcttgagcccaggaggcagaggttgtggtgagccaagatcgcgccactgcactccagcctgggtgagagtgagactctgtctcaaaaaaaaaagcctaacatgtacgattatgtaccataatgtgatacttgacacaaaacgatgatgttactggtttatgtatttactataatatatcttttattgttattttagagtgtactcctacttattaaaaaaaaagttaactgtaaaactggctcgggcgggtccttcgggggtatccagaagagggtgtcgttctcataggagacaacagctccatgcttgttattgctcctgatgacctttcagtgcgacagaatgtagaggtgggatattgatgatcttgaccttgtgtaggcctaggctaatgttcatgttttctttttaacaaacaagtttaaaaagtaggataataaattttaaaaataggaaaagcttatagaataagtgtataaagaaaggaaatgtttttgtacagctgaataatgtgttttaacctttgttacaaaagatcaaaaagttaaaaattttaagtttataaagtaaaagttacagtaagctaagattaatttactatagaaggaaaaaattttttaaatcaatttagtgtagccttaggatacagtgtttataaagtctccagtagtgtacagcagtgttctaggccttcatgttcacccaccactcactctgactcaccccagaacaacttccagtcctgcaggctccattcgtggtaactgccctagacaggtgtgccatttttttttatctcttatagcatattttattctttttctatgcttagtatgtttagatacacatatacttactgtgttagtattgcctacagtatttagtacaataacatgttgtacaggtttgtagcataggagtaataggctataccatatagcctagctatgtaatgggttataccatgtagggttgtataagtatactctacgatgtttacactacaatgcaattgtctaatgacacacttctgagaacatatccctgttgttaagtgacaggtggctgtatttggaaatgaagttatatgtactaaaaacacattgtcactggcctttaagagtgacaagtgcccggttttccccagaaacctagcaccaggtcatcatctccatctctttcatgctttaattaagccaactttccgtttagcttcaaacacttcaaggaaataaaagaggttctttcaatgattctcttgttttgattagttatcaatattatagtagcataggtttcaatttttaattgttgcaaaagtgtagtgtttcaatggtgaagtaatttctgtgggctgtctgcagtgccaccatttatagcatttatgtctttggaaaaacgtatttcaattgccatatgactataagttgtgggctttccatctctggagatatcatacttaaatacttgcctgtttttaacctttctgttttcagccttggctaccttcaaaattgtgctgtcatgcactgccaaactggttggctgtcccatgaagatcaaattccatgacatccatggcattttttatggaggtttctttctctggaaacttttcttcccccaatccctgttaaatcgaagtttaacggtttttcagggccttgtgtataatatcactctttgtagaatttctttaatcaaaatagcaaaaggaaacatgtttcttggttcatttatcttagtcttgagtgggtttgtgtgcatgatctaatatcttcattatgtattaaggatcaactgtatgccagacttagtgcaggcattagcaacttattcttagggagcatacagtgtgctggaaatgaaacaaaacaaaaaccaacaggcacaaaatcattacagaacaggtaagtcttattgtgaagtgacaatagtgataaaaacgaagaagagggaacaatcattaattaggaaccaaatgttatagtattattctagtataactcaagtaagtgtttgattgttgttacatgttctgtctatgatgtatatgttttagcctatatattaggaaatgcttggagttgtgtttgctgtttacaagaggtttccctacttctcagagaaacttaccaattttagatatgtactctttatattactttattttgctttttgggacagagtcttgttttgtcacctaggctggagtgcagtagcacaatcataggtcactgcagtcttgacttcccaggctcaagtgatcctcccacctcagccccgccgccgagtaactgggactacagatgtgcaccaccctgcctagcgaatttttataattttttgtagagagagagtctcactacattgcccaggctggtctcaaagtcctgggctcaagtgatcctcctgcctcggtctcccaaagtgctgggattatagatgtgagccaccatgcccagccaggtgtgtattctttataatcagagatactctatgatataattgtcaatatttttattttggggggtgacagtaaatgagtatttagcaatattctctgttcccctgaaatttgtaatttttggtatatttacttaggagaaccacggacctttagagacctgagtccaagtgtgaattgaagaaaaacacctgtatgttttcagtaggcctatagactccaactcttttcctacatttattttttcttactacggtcagtcttttgtccctcaggtcctccccattatcactacccatcccatagatgagctctgtttccttatattcaaaacaaatattcttcaactgagattatctcttccttgctaccagttcactgctgattttacaggttagctaagtctagtgaaactgcggagtcttccaaagccaggtggatgaatggattatgctgtggtctaggctaggtcttgttgcctctatctgtttcacttttgttccctctttttatgttgaaagtagtatatgcttatttaaaataatggagaatatgaaaaagttagagtcttattcttgtcactcaaatacaatttttgttagcattttgttgcattttcctgtcattttctcattcgtgagtgttcagtttttataaggtatattactaattattatatacacacagttttgtatcctccctttttcgcttataggaggcatttttcatgtagttatgtaatcattcatcttctaagaggtgcttaagtaacattccttataatggacaaatcgtagtttacttgataattctactactattaaacatttcgtttcccccctagtttttaatattattagtaatggtatggtgagcatctttacgtataaaatgttttaatgtgtagggttatttcctacagatagattctcctaggtgtaatttatgtgtcaaaggttataactggcctcagactctatttacatattgtcagatttcttttcttttccttctttctttttttttttttttttttgagacaaggtctcaccgtgtcacccagagtgaagtgcagtggggcgatctcagcccactgctgcctcgacctcctgggttcaagcaattctcttgcctcagcccccaagtagttggggctacaggtgtgccaccccacctggctaatttttgtgttatttttagagatggggttttgtcatgttgcccatgctggcctcaaactcctgagctcaagtgatctgcctgcctcagccttccatagtgctaagattgcaggcatgagccacacccggcccttgtcggatttcttgaaaaacattttttcccatgtcaccttcctactcaggaatttttattagctttctgttgcctacagtctaaagtcatacccatctaattggtccttttcgtttttaaaacactttctaagaaactttttttgttttaaccacctacttatcattgagcattacattccatctgattttccacataataaaaagtgatgcagggaatattctcttatgcagagagaggcatgtttttttggattttttgaggggataaatgatcagcagcgaaaatgctgggttaaagaatataaacattcaatgaaactaataaccaagccttttaaaaaataagattatatcagtttacaaatttaccagttatgtatagtcttcctagtagtgagaataataattttttttaatgttcatttaagggaatgtgagggggaaatttccgtgtttttttcagtttgcattgtttttattactagtgagatttcaggtttgtccacattatttgttggttaattgtattttcttcggcttagctttcaaggccctctgtaagttggacctgcccttttcaccttatctgctgttattcaaacccacaaatatttattaagcccctgctggctaacttctcccaccccaacaaataaacacactctaatcaagccaatctccctattgttcccttgaacttgtcgggcttttcctttttatgcttttgttcatgctttttctactcctacagtgcctgtccctcctcttttgcttacagtatgctgatttcccccatcctttgggttcaacccaaagcttttttcctcttggaaattttccctgacctgaccaacttgcttgaggacagggtccggggctcatactcccttgtatcccagtgccttatttaggatctgcctaatatagtaggtaggcaatgatgttgctttaaaaatgcatcttgagatagggagacctagacttaacttttggctctgactttgagcaatttattttagtcccccgggcctcagtttcttcatctcagggtcaatcataaaatggggatggtaatagtatctgcttctagagttgtgaggaataaatgtggtaatggtcatcccagcacttggtcttcctttccttaggacccttcctgatgtgccccagattctgtatgccatctctttcttgcggtggtattgtttcttgtgaattgttatatgccctcagataccaaattcttaagttggtgggggattgtattttaaattttttgcccatcctaaagcgctgtgtaaatgctgattgagtataattgagtagctttggtagcagtgagtataattgggtagctttggtagcagtgaaaatgagggcaatgcagtgaggaggacctcattttcagtcttttactaaaagctttactgaccctttattggagaactttctcttagggcctttaaaaaatatttaattttgttgcttattcagccaaatggagttagttattcagtagaaaatggtaaaaagatccaaataacaccaccggatttcacttttccatatagtgtttcaaagcgttgtattcattaatatttgtgcaaaaacctatggttaataccacaagaagtcataaactaaaccagatttttcccctttttaactttcacatgacttggattaacaacagcgttactccctaatttacaccaagcattctcaaaaagctgaaacaatgattcatgtttagtcaccgtgtgactggctattttcatttatttaaaatataaacaacaaaaaatatcctggataaagatctccacatattttaactagtgacagatgctatgatcagtatttttacttaagtcaggcattttttacttacacctcaagccttgcaattaagctttaggcctttccaagcataacagttaaccaataaaccaaaatatcagcctggtctggcttagctcagcggtcttttgatttcttccagtctgtttgatgtggaggcttattgagatttatctactgagctgttcatagtttgtagggctgagagcactggctatattatataagattccattagtgacagaagagtgtagacagtctctacagtgtagatcgtttagtcagttgtggtagtcataattttgttgaaatttttaagactgttgtcaagctttttaaaattaatagtcaattatttttcttatttaccagtttatactgtgagcctcaaaacagatgtagtttgattggttcaatttagtagaaattttctcaactttcaggagaagtctctgcagatgtgaaaacttttccaattatttggaccagtttacccacagggaaataaaaatagaaatacagagtaatcagtcctaaatatttgctgtgtgggtaggtaaacattattccattgtattgttcatgatggtagtagcatcagtataccaaccttaagtgctacaaagggcttttacatactatgtcctgtattcctggtagtgatactcagtaagtattattgtcccttttctaaatggcacacttggaatttgggttatttatttgctacatcatttcatatctagcgtgaagcagagctagtgttcaaatttgcactacatgaaaggttttttttcttgttaaataatatacagtatttcttaaagtaacaaagttctgccaagcagcatccccgtggtgtttttttttttttttttttttttttgagacggagtctcgctctgtcgcccaggctggagtgcagtggcgcgatctcggctcactgcaagctccgcctcccgggttcacgccattctcctgcctcagcctcccgagtagctgggactacaggcgcccgctaccacgcctggctaattttttgtatttttagtagagacggggtttcaccgtgttagccaggatggtctcgatctcctgacctcgtgatccgcccgcctcggcctcccaaagtgctgggattacaggcgtgagccaccgtgcccggccccccgtggtgtttaatcacatcctctttctttagaagtagaataaaattactcacatttatcctgctgaagataagaaaataaggtcatattggaggaataatgaaacatatttatgctttctgcctcagttgcctcatgtcttgaatggggaaaatatctcttagggtttttgtgcaattgagtgagttcatacgtgcctgcagattaggagagtacttggcacagagtaaatgcacaatacaattagctcttgtaagcattcatttactcagtagggtatattgacctgctgctatgtgccaggtaatatgctgggcattaggaggtaaataagtcaaagtctttgcccacaaagatctcagaatcaagtagagtagacataccccaaactgtgtgctagcagcgtgaatattctcatatagaggtatgcaaggaggtatggacacacagagtagggatgagtagggactgttaggcaaaacttcctgtaagagtcagggcctgagcttgaaggatgagtagaagttaaccaagtgaagaaaactgtaggggcaaagggagccaggaggacagatgatggtagtgaaaggttggtgtgaacatgttttttcaattcagaatttcttgaagacattaatatgctgctatgcattatgattctccagtcgtagcattgactactcatttaaaatattgaatcatggaatccttttaatagaatatccattgaagagctgtgttttataggacacactttgggaaattctggatggaccaagtggtgagaagagaggagcatgagttcaggttggaaatgaggcagacaaggaggatggagagacagatactgattagagatattaagacagtagatttgataggacttgatgaaaaacaagggggccagggaagaggaaacatagtggcatggcagcagatttgtggcttggacagattctggggctcatggtgccatttacagcagcgaggatttaggaggaggaacagactggtgggggaagataccaagttcagttttgcccctgtgttttgagatgcctgggggacatccaatggcagatccaaaatgacatctatttggcagttagatatgtagggtctggagcataggagtgaggtctaggtcagatgaaggagtcatccgtaggtggtattttatgccaggaaagtgaatgagatcacccagaggggctagggtagactcagggaagcatcagtatttaagtgaggtatgaaggatgaggatccctcagcagacattgagtattttagtaatctgatattctttgggacaggcttgctcttttcaagatctgtgagtattttgttgtgttgtgtttttctggaaagtgtctgaatccacccatgcagaaaatctactttgtgggctcttcctcccaagaatctgggtagttgtagaaggaggcacttaacccacgctctgagctctctaaggagagctgtgtgagactctacccagcccttctgaactcagtcagagaaggtggagccatcttgcatcgttaagttttggagtgttaagtccttaaatgtaactggagaaataatgaaagggaagtattccactggattaaacaagttcaatggattttaattttcctgataaactattattaagaaattgttttggagatttactctttgagtaggattagctaacctccattttcatttggataaatagttctttaattagaaaccaagatttagagaatagttcctattgctttacatagtgtagagaaggtatgtgaaactgccaaatcaaggttttcctcatgatagtgagaagcagggaaaacaagaggaaattataatatgttaagggaaaagattcttttcatccaaatataccagcttttatcttcaattctgggtctttgccggcagggttttttccccctgttcttgtcatgccaacagttgcatatttctggcaaaatgttcgttactggctaggggtgctcaagaaatcttttgctagagaattaagcaagcagaagtctgtcaaaacaaatattctagtttgaaaatacagtcctgcgggggaagcaggaggagtggatagtggaggaggccagggcgtgttctgaggctgagtatttatttcataagaattctgtgttctgaaagactgttgtttgtaggaatgccggaggaagcgggattgtggtacattaaatgtactgatgagcaagatttttctggggaattttggtttgttcttgtgcttgttatgtagctcatgtgatgacagcctttgccgagagtgatacattttgctaacaaatagccttcttaacttaattcaagaggcatttaacaaaacttattagtttacatggaaaaaaacccaggcccaaggatactaaacacacataaacaaagatgcacataaataccagtccacttcataagcatttatttggctaggaatgccaacattatacaattccaatcttgaaagtattcattgattgattcaaaaaagtaaaacttgtttttccttctacttcttttttgttacttttttttttaagttacttgttttatagatgagtaagagtattaatggatagaagcaaaagttttagattcctttgttatatagttgctcaaagctactattatagaagttgctcttcaagttggagaaacataggctgacatttttggttttacccactgggatgggagtaggtgctaaccatattaagcctcacggatgaaaactgttgcatacaaaagtggatttatttcttctacagaattttctgaccatatatcaatatacaactgagattttgtgagataactataaataaaatatactaccttataatattgttgtaaatgatcttacatagtagaatgtattagtaataaagctctcaaaataactaataaaatagagatcagtttattcttagcttcttccggcaaattttaaacttgctactgtaagcaattcaaggagcacatgcctgtgtctggagcactgagaggaaaccatcctgctctttccttccctgatttcatatactttagttattggaagaaagattaattaatgtaaaatttctttacttttagtaattcaaaagaataaaaattttttgagggcttgaaaagatcgtggtgcaccattggcaccattggaatttgcctttagtaaatgtaacatttgttttctaaagaattataacaacatacttaaattccagaacagtaagcaaaatagcttaagttcactgacttgaaaaaacattcttttatactgcacgattctaaaataaatacttaaaagaaacagagagcaagccattctatcttggatttcattttccttcagatagaacagctagaacaaacattcttgctagttaacattgcctgtgtttttatgaagttaataactgacctgtcaatcacgccctatataaatacggtagttgaatgctttctgctttagaagcacttttatttacaagagctgccagccaagatttccaaaggactccacgggctgtttgctttgatctgttttgagggctggtctctttatacctgttggtttgctctttctgatacctttgtgtaatcaggtatggggagagcagatgtgcagaataaacacatcttaagggaaccaagtctcaagagaaatcaagtaattatgaatgaacagctctaaaaaagagagagagaatattttcttaaatcaacttagttgctgttatgaccaaagaacagatgttgtggtgttcaccccagagaagcaagagattttcccttaaacctcagcttataatgaatggaagtggtatgtgtatccctcaccctcaaactgttgctgtcctttaaatttgtaaattgctgagatgttgcagctcttctcagttgacttttgcctttgaccttttctcatttgcttcttccctaggaaatgttaaccacatgtctctgcccaaataattgagtctctgtgagagtgtttacctttatattttgaactggaaatgccttttagtatttaagacaattttccaaaaaagatggctttttgttttgtgattttgatttggagttctccctcaacactgagggagaacggaaagccaaattcatctttgtatccccgcaaatggcaaccatagggcacagtgtataagagaatgatagaaatgaagagaaaccaaaattctttggtcttccttccaaaatggcctattctgagtttagtttatttcacttttcaattaaatgttgccctaatcatttccatatattacatttaaatatcacttttctctaggaatctgaatgtttgaacatattagaggttgttaccttctattttagtttgaaattgaaacatcaaaccaaaaggtagcctcccctgtttttttaaactagaaatgtttaccttgactttacagtcctttaggagagcctgatttagagattttcaggcactagaagttcaccttactatttcaggaaattctctttatacttttcaaatggctttcatggacattttttggtcagcgccttccccttttgtgacactggcaggaatcttagagtttctgtggaaagatgcctgaacgttacccatggtttggaaagcaggtgttttattaaccagagttttctcctttgttgctctaacattttcaaaatctagtatcttaaaatgttatttggttccttatttatggttttaaaattctggcatctctatagtaatcaacaaagtataaaatgcagcccgaaatccccttgattcagcagccttcctcagatactcacttgccagagtaaaattatttggtaaatgttaaggtagattaaagcttgggtttaaactctgttccctctgggcaccttttgggggtcagaggtggtaaagctgtggtattgcctggagccagtgcaaactaacaccgttgtgttgcctgtgtgaaggcagaaacctctaagggatgtgaaactgccaaaattacatttgaacattttcaggcctttgattgcagaacctttgctgaaagcagtagtgcagggtagccagagatcaggccagagaagcaaggaggagtaaacttggatcggccatgccacagatactaggggagaaactgcctctccaaacgatgcacaagggacaactctgaaggtccatgggactgctgagttagcagattagctgagtcccctccagtattttcattttgcattcatccagggctcaaacctataattaaattttctgaacaaagactctattaacccagaccatccagattgatgactaacagctcttccttccaggtacataaggaaatctgtaatgcttaaagcaaaataaagaccctagtcaggtttgggggagggcaaagtcagggagtggatgtagttaggactgggtttacctttcaaaaatcattttttagtacttaaaatggacctttcaatggttcctgcacttactcaagtgtatgtgatttactgaatgatctaaaacttagtcacagggattttaatttagatatctatgaaaatgtgttggtttttaaacttttggcacattgtttaaaaattctctctttaatattttgtgtgggcagtgtagacttaggtgaaacttttcagcacagacccagacacagttcattatgttactcctatgccaaaacttcaagtagctttccagtgtttgagaaataaggttcaaattcattagcttggcatttgaggccttccacagtccagcctactttctacgagaggtttttgctctagccttggctgttgtccccagcaaaccttatacacctctgcctcaacagtgtccttgtgccatccccttctccactgacttttctcctcctcctacagcctccccacactcctgggacaggtgaatcctaactgttctgcaatgccaagcttcacctagaatactttaggacctctgcttttccaaatctgtcaacatcctggttaatcccacctcttgtgaaactggctttcctggagcattcctctgtgggctctcccccaccagtttggcctccagagcaatgttataccacgtctatggctcttaccacgccaacccttcatttgtggttggtttttgtgtttttgttttcccattcatttctgtcttgttttgtaaacttgataaagttccttgaggcttagaattgtatcttttatgtacgagtgtcctccagagcacttaacataatgtttaatatatatctgtcagttgtttgattgattggtgcatgtctcaggcccagggcttgatgtctttgcagtctctaaagacagcgagctattttcagaaccactgagtacctttgtaccaggtttattttttggcttttcaacttggtagtggagatgttaggcccagttctgtccagaaaatgtattttccaaatctttgcatggacagaatagtgttacagtcacagtctggagcagtttcacctgggtactgccaactctttcttatgctgactggctgacccatgtggaagtgttcctcagatctcatttcagctttctggcttactttttttttttttttttttttttttttttattaagagaaagcttgtttctaagatccttttgggagcaaaggcaagtaagtattcattaaatgtttactttcttgactttaattcacttcagcagatgataactcaggtgggattatgccttgacagtgatctgacaaggtccttgttcagggtagttactgacttttccagtatcaaccttctagatacagcatgaagccaacatccttgtgtctgaactatataaggaactggctttcttttaattttatgtgttttgagtttgaggaagatgcatattttgccaagatgtggcttttgagacttccgtgctgaactcatttggtctgaaaactactgataaaatttctacttttgcaaacttgtttttttgtttttgtttttaaaaagtaggcaaactcagttttttaaaaaacaagtctacagtagtgaatgccctaactgacacagcatgctttggcttctggaagcttgggccagactctgagagattttaatagccagtatggacctatgtacacagtagtcagtccctcacattcacacagcactgtttaacatgtgtgtatttattcattcaacaaatattttttgagaaccagccaggacccaggcattgtactaggttcatgagatacagggatgagtaatcactggatattttacttccttattattattttgacttttagtttctagtctgttttctcttactagaatatcagctctttggagggtgggtatttgcctcattcagtgttttatcttcaacacctagagcagtgcctgacatagcagaagctcagtaagtattaatcaaatgtatgaaagaaggtctacaacaagggatgtaaacacttataaaagcacatgggaaatgcatataatctgggattgggggagtcaaggaagacatcctagagcaagaaagataatgggtgagaggaaggatgtgcaatatttatttgggaaagaggagtggaggtgagggtgactgctcccgtgcaaaagtcaggatgaaaatgcacagggtacagagagggcagcctgaagtgagctggggaccttgtcagctaactcaaggacatgggagcaaagaaagtatcttaaacacaggtataacaggatttgctttagtatgatcattttggctgatgtggctggattggaaagttgtgctcaagactgagagatctgtttgtttgaataattttgtttgttagaataatgtagacaagacaagtggtacctagacttttctgttttgtgaaccagcaaaattttttttttattttgaagatcaacataatacagttatcaaccctttaattttgttaaataagtacattaaaaagcatattacatgtcagaatcatttcataaattaaaggacattttcacatacataaccacatatatacatccccctttaggaatctcaaattaatattagatatttaaatagaataccttagctttatgcagaatttacggcattgcactgtggggttttttgttgttgttttggttgttttcattttcttcatgaatgggcactggcatgtggtctgatatttgtaaaccggagatgtaggctaggatgaaaatgttggtgatcagaattaggatagtgacagtaggggttgaaaaaagtgaatagaattgagagataggcggtcgaatcagcagaacttggtgatttcaaagtacttgcagatctcttatctcatttgatcctaatggtaaccatgtgaggaagttaatttggttaggtatagttatccccatttaatagatgaggaaactgaggctcagaagttaggtgacttccccaagttacatatctgatgaatagcacaatgaaatcatcattcaggtggcattggactcttggtatatggcaccttcacccctttttgcttttgctcacatttcagggaagaaaggaaaaggaatcctgggctccctgtgagtcatatcttttaggtcaaaacatacgacgcagactgtccttagaataaaataatattttagtgatgactctttgatttatcttatcttgcaacatcatccattaccaatccatgaacttgagtaaccctatttaaattaggccagaggagatgaaggcttctttggcagtattttcatgttatcctgtgctaccctttttcctttccataaataagccttggccattctatttatggttgtgtttgttttgttttgttttgttttttgtcgagaggtagaggacagtgagactgtgtgtgtatgtaaggatatcccctatcacctgggattttttttttcctttctcatcctcagtgtatgtgcagattagtttggtgctatgtagattccagaaagaatggaatagactttataatggagtactccttgttgaagggcaaagacaggaagtggaagtgaataaaaagaatgaaattggacttaaaggagaaaaaagtgaagcaaaaacaatttgaattggacaaaagaaaaaagtgttagaaaatatttgtgggcggttccctataactgaattttaaataacatttttggtgtatagtcataaaatcctctgacctatgaaacaccagtttaatggaattaattaaaaataagatggaatgccagaatttacatatgaaaactatcagtaactgttccttcaattcattgtttttatttagtctttgtatcagtcatttttctaggctccttgtttcctggcaaatttgaaggtgtttttggaaaactgttaagattgactttaaattattttagtagagactcaactactagtaagtctgttgtaattacaaataattatgagaaatacggtttccttttccaagaagcaaataaacttgttattgaagcatctgcacctctttgtgtatatgttcacagaagtgtctacttttactactagaatgggcacatcaaaaccaaatattggtatcttattatgtgtgagtaggagagtgagagtagcattgtgtataccgccattttcatctcctttaatcacctcactcactgtgcatgtgtgtgtgtgtgtgtgtgtgtgtgtgtgtgtgtgtgtgtgtgtgtgtgtagatatcctaaatacgttttttctaccgatgtggaacattctatcccacttcatagctgtcttcctggcctttggcacgtgtgtgcacacacacacacgtatataaaatttagtgtttgattccttcaaagtataggtgttaatgtattcagaatgctgtgtaaaattttttatgccagacctaaattttattcatgctttcaatgcctgtactttgtgtatttttaaaagctatttgcattgtaagtttgaaagtgagttatgttctctggtgtactcttagtatcttagtatcttgagtgtgttgaacttaattgtaatttatactaatttcctctctattcctttcatctcatctttaaagtgctgagggaaaggaagaggacttggtggcaagagccaagacaaaagaacaatgtgtgtgtaatttgttcagaaggtacaaagttagatttgtgatttgttgatgcattatctcatttctcaagtaattccactaagtaggcactattattcccattttatagaaaacaaaatgtagtgacagagcgagactctgcttaaaaaaaaaaagaaaagaaaagaaaatgtaaaattatttagcaaggttgaatgaatcacccaaggttacactgccactgtgtggtattcctctggtcaggctggttctagacctttgctctttctctactttgcatttcctcattcccaccccaccacagaataaataatctgtggaacatggtttcacattctattccatgatgtagtagcagccttttctaaaatgaaatgctgtgcatattattattttttaattgccattggaagtaggctgaatgtagtcagataaatagtatttgaactgccttagtttatgtggaatattacctttgtctgaatgcatgactttttttaaacttttaatgtgattttataatttagatgagtatttgccttaacaatgatgagttttgcacatttttaagactacttggaggtatttatatacctcaaatatttactaggaagtatctttgcaaggttaggtaaaacattttaccaaatgagtttcaatgagtctctgttgggaaaggttaaatagcactgtagcgtagtcttttggcaatcgagcagttcgtctgcacaaataacagtgaatataattgatggtcttagtaataaggtcataaagtcaaaaagagctaccacagtgtggtcaacgttttgaccataaggaacagaatgtaaaagttggttagctggaaggatttcctgcctccttagtaactattgtgtctctgtttccttagtcatagctgaattgagaagaagagaaaaatcttttaattctgcatttagaattgatgtttttcagatttacatagtggaaagcgtgtttggatgagtataagccagaacctaacctatcctttgcataaatgcctttctgcaatactgcttattcaggataggcttctcttgtgtcttcttgttagcctgctctctaacccttgttttacacattatagcatttaatatgctcctgtttttaactgacagaattactctttgcattgttgtgtgtgtttgtgtgtgtgtgtgtgtgtgtgtgagagagagagagagcgagagcacgtgcttatgcaagagagaaagtgtgtttgtatgacggacagaagtactacaggcataccaagaaacagctgccacctaaaatttataatcaacaatagaaagaaaaatagagattttttaaaaacgggaattccgtagaagcaggtatactgtaatatagggaacagatggaaaaaaagtaagttacactctcagggaggtgagatgaaattaagagcaatctgtgaataagaaggagctttagaaaattaaaaaatatgatagcccaagtaaaaatttcagtacatactagggaagacagtaaaaggacactgccagagattgacctagagagagggagatggaacatgggagagaaaaaataagattagaggattatcaggcagttgaacattcaacttacagaagttcagaaaggagagcagagcaaagtgagggcagaaaattatcaagtagcttaagaacatgtagaactaaagaacatgagtcctagtacagtgaatgaaaaatgattcaccccaagactcgtcatttccaaaattttgtgaagtgagagaaaaaaaaaacagctcatatacagagaattaggaatcaaaatgacagtggacttagaagttaatggagcattgccttcaaaattctgagggcatatgatttgcttcttattcgtatttaacttaactgttaatcacacttggagctaaaatagagtgtacttttattttaaaagttttcttttaaattaaggacaaggaaaatatctttctctttctttccaggacatacatgaatacagcacctaagtattttttaaaagttagttgccaaacaatattgtttaacataaccatgtatgtgtaatttagtgtgtgtgtgtgtgtgtgtgtgtgtgtttagacagggtctccttctgtcactgaagctggggtgcagtgttgtgatcttggctcactgcagcctcgacctcttgggctcaagagatgttcccacctcagccatccaagtagctgggactacaggctcacaccaacacacctggctgatttttgtatttttttgtagagatgggttttcaccatgttgcccaggctggtcttgaactcttggactcaagcaattctcccacctcagcctcccaaagtgttgggattacaggcatgagccactgaacctggctaatttaatgtttttatatgtgcatagaaaaggtctagaatggacaaagtggaatttctccttctacttacttatttgtatattgcttgtttgttttaatgagtgcatattaattgcaattaatagaatataactaaagggaagaaaagagacttgatttatttcttcatttatttaaaagaaaaaagttggcaggccaaggcaggaggattgtttgaggccagaagtttgagaccagtttgggcaatatagcgagaccctgtctctataataattagccaagcatggtagtgcatgcctgtagtcctagctacttggaaggttgagccagaaggatcacttgagcccggtgagccatgactgctttactgcactccagcctgggtgacagagcaagacactgtctcttaaaaacaaaatgtagaaagtgcatgctatgttgttctcctctgctgggtgctataagaaatatagttgaagtagcaaacacagcttcagtctttaaacgattttgggtctggctattaagcggaaacacatatgtaagggaatgactcccagctatgttgaaagtctgactctgtgtaatttcaatgtacaggctgctcttggggccaagcaaattcctttccagggtctgcaagaggtggcagtctactaacttcagagtactttaaaaaaccagcgtttgtgagaaaaccaaaaacaggactctcatcttggaatatctaacttaataaatttcatttgcatgtatacagaaaccaacctacttactgctgccagccccaggagccagaggttagagtttttaataataatagcaataatgagttatacttattccagattagttttctagctctcaaaaaaacaaatggctaagatgtccaaaatgttcttttcacaactctaccaaatgctggctttccctctccgtctggaaatccagccaatctgttgaaaattatcctattatttgagtacttccaggcagttcttcagaaggaagactaattcctgcagtctgagatggatgtccacttcttaagggactcttttccatacttctgcagctgaggaaaatcacaccttgtatcctgagtcttatttcttctaattgtgaatttgggaaaatatgtgtataccagacatcacatcatacctatagacagcattgtgtcttaattgggagtgtaacatttgcctggtgactacttgggttttttgtttgtttgtttatttttcttgtaaataagtctcagcctgagtgttcacagacttacaaaaagcatcggttcactggggaaaagtgaagcatttagcctgaataagaacaaatacacacactcttttctggtttgatttgcacgggagttagatgtttttttgggggtgggtggagggtagtaagggatattctagtatattaggaagagtctcttaatttgaatacaggagagacaggagacttattggacccaatggaattatctgtggtccagtgatctccaaaaatgctttgtaacagcagatgattagattttaaaagatcagtttagctggcagtttgcctgttcatctactcccataaattcagtgggtgggcctgactcagtgtgtcggagtagaagctcaggtgaggaaccttaatctaacctgaccaggctgattgacagcagtggagagactgccatacaaccaaaccatggggacacatgaacttctttggaaactggcctgtctgggtcacagtgtgtcctctgcttgttaagaagatgcctggcacagcagtagttagattacttgtaaaatagaaaccttggaatgtctaatgactagattgggaaataagataattggattctagttctgtatttacctccaagctgtattttgatgttgggagactcacttcatttccttgggtatcagttttctcatctgtaaaaggaaatgagtacagtcatttgaaaatacttctagttttattatgttccttgaaatatgggactattggcaccaccccctcacttgaacaatatgagttggcatattaatattaatcttagttaaaagtgttagctgaacaaaatgatagaaacaaaaaaaaattatttgagaatattggaccttatgctaaattagtctattcacttttaatgaatgaaagaggaattgttgggcaatttcttttttctttctttctttctgagatggagtctcgctctgtcaccaaggctggagtgcagtggtgctatctcagctcactgcaacctctacctcctgggttcaagtggttctcctgcctcagcctcccgagtagctgggactacaggtatgcgccatcacgcccggctaatttttgtatttttagtagagacagggtttcaccacgttggccaggcgggtcttgaacccctgacctcaggtgattgacctgcctcagcctcccgaagtgctgggattacaggcgtgagccactgagcccagcctgtgatttcttgatagtatagtagatgagacaaatgtagtactgtttgaactgttggcatgtttagtacacattcctgactaaggttatgtgatgctctttagaattaacaaagaagagtttctgtaatcttgtatatatctttagagtcaggttgattaacatggaacccctatggctgaaaaagaaggggcaggatttgtgggaagttctaaaaaaaatagcaagaagatagcaaatatttactaatgcctcctatgtactagacaccattctgggtgctgggatcagagcagaaattagatagtctttagtctcagggagctaacatcctagtgagaggagatggactttaaacatgtttcagtaaaacaacagtaactgttaatgttatgaaaaagtaaaattggtattgtagggaataatggacagtgggggatggaatgtgcttctgtaggttggaaagatagggataataggaaatgaggaaataaggagtgtggatagctgttcagagtttcactttagagtttctaaagccatcaagctctaaactttgcctctggagctcgtggtggcagttcaggatctgtgcttgcctaaggataagagagaggccaaactgttgatcacttgcctcaatcctgcttcaaccagaacagctctggtttctttgttttaatttaatagcatattttttattgtggtaaaatacacataacataaaatttaccatcttaaccatttttaagtatatggttcaatgatattaactatatttatattcttgtgtaaccattaccaccatttatgttcagaattccttttattttgcaaaactgaaactctatactccttaataactcttcattccccttttcctccagtgccccagtaaccaccattctactttctgtctctatgaatttgactgttctagctacctcatagaaaggaaatcatacagtgtttgtcttttgtgactggcttatttatagccacccctgctgtcttccgttactatttatatggaatatattttcccatgattttacttttaatctatttgtgtccctagagctaaagcaagtctcttgtaaacagcatatagttggatcatgtttttttttatccattctgccaatctcttgtcttgtggttggtgagtttaatcctttacatttaaagtagttactaatgagagacttacttgtgtaatttggctatttgttttctatatgccttatagcttttttttaatgtttagtttattttttgctgtgaaatgttttaatttcctcatcatttcctttgtgtgtttgtgtatattctataactattttctttgtggctgccatgggtttcaatttaatattctaaggttgtaacattctaatttgaatttataccaccttaacttcagtagtatacaaaaactctgctcctatatggcttcgtctctaccccctttcagttaccgatgtcacagatttatatctttatacagttgtgtccaaaacattagtagttgttttatttttgtgcataaatctcttaatttatgtagaaaacaaagtatgaagttataataatactggtttttaatctaataatagtttttaaaaatatgctagtctcttaaatttttgtagattacaaaaagtggagttataaaccagagttacaatgatcctagcttttgtaactccccatgtatttccctttactgagatctttatttttcatgtgacttcaagttcctgtccagtgtccttttatttcagctttcaggactctttttatatttcttgcagggcaagtctagtggtactgaactcacttagtttttatttatctgggaatgtcttattttctccctcacagttgaaggaccgtttgccaggtattggattcttggttaacaggtttttttgtttgtttctttcagcactttgaatatatcagcccactgccttctagcctccaaagtttataagaaattggctgataatcttattcaggaccgtttgcatgtaacaagtcactttttcttttttaagacggggtcttgccctgtcacccagcttggagtgcagtggtgcaatcacagcccactgcagctttgacctcctgggttcaagtgattctcccacctcagcttcccaagtagctgggaacacaggagcacaccaccatgactggctaattttaaaaattctttgtagagatggggtctcaccatgttgcccgggcttctctttctgctttcaagcttatctctttgtctttgtcttttgacagtttgattttaatgtgtgtgggtcttttttagtttatcctatctggagtttattgagcttcttggatgtttatattcctgtctttcatcaaacttgggaagttttggtcattatttctttagataatctctttacctctttctctctctctcttctccttctagaactcccataatgtttgttcacctgatggtgttccacaggtcccttggacttattcacatttctttaatcttttttttgttcctcagactcaataatttcccttgtcttatcttcaggttcattgattatttcctttacctactcagatatgccttcgaatccctctaatgaattttttacttcagttcttgtacattttagtggtaggtatttttatgtttctttttaggtttctatctatttattaatattttcattttgttcatgtatcattttcttgactttctccatgtcttcttttagttttttgaacagcttcaagatacttgttttaaagcctttgtctctaccatcaagtctttctcagggccagttcctgttgggttccccgccccccctttgaattggctatctttccctgtttctttgtatgcctagcagggttttgtttgtttgttttgttgttgttgttggaaacaggatgcttgaatctaatagtgtagtaactctggaaatcaggttctccctctttctcagggtttgctgatttctgattttacttttgttgtttgattgtggtaggctttgtctgtgtcagggggtctgcctgatgtgtaagcttaagtttttctcaggtcttttttgagcctgcacctttcattgggtgtgtgtggtaaccttctacattcccctgatatgtggttacttttgaatgtcctagactttaaatatctgtcttctgaaagtgggaaaagagaaaaatgaagaagaaaataaaagcaaaaaaaaaaaaaaaaaaagaaaggaagaaaagtgaattgccctttaaattccttgcaagttgcttcagcctgaggggaggggtttgtaactgtgctaagagggttgcaacaatggctgcctgcctatgtgtttgtatctccaagatcagaacagcaaccattgatcaaagcacagatccccagatttttggaggacgggatcctcatcccacaggctttgtgtaagctgatcctggagcatgtgcatagttgcccgccatgaggctagggattggttagctgctacagttctaggagctgaaactgaccaaaattgactgcaatttactgtccaatccttcagatagactacagaatttcaaaatagttacactagacccattctgccagtgcagttgttgccttcgtgagaacacaggttcctagtgcttcctacttagtcatctttcgagaattctttcactggttttgttttgtttcgatgctttattaataaaaattggcattatatttgaaataagtaatccattgctttaaagatttggaaaaacaattgccttggaaaaactagttatgtttattctttcccccttagtgctgtcaaaaatcggataacatagagacaaatctctaagcagaaagttttatttaggaatatatatatataaaaacagaattgtaaattgggatatatgcaaagaccagagtggtttttggtatgtccaaagtacaaaggaaatgttgggattttactgggaaagagaaatattacataaaatgttttgaaacaaagttcattaaattacaggtcgtttcagcagctactaggtaaaactagtcttaaggctatgggaggttatttcagcagctgggcttgtgagacagttcctggagctggcactttgtgtcctgagtgctttttccctgggttccttgactctgatttgcttggatatgacaggaataactccaattcctataatcagtttttgcagtgccttaactcttgtgttttagcatttgtgacaggcagattaatggcccttcaaagatctcagatcctaattcccagaatctataaatgctatcttgtaagggaaaggggatctttgtagatgtgattaagaatcttgagttggggtgatgattatcttggcttagctgggtgggccctaatgaaattgcctatacaaaggaggcagagggagatttgggagacagaagaaaagagtatgaccacagtgacagagattggagtaatatagatatggtttgatatggtttggcttgatatgatttggctgtgaccccatccaaatctcatcttgaattgtagttcccttaatccccatgcatcgtaggacggaactggtgggaggtaattgaatcatggggggtgatggttttataaggggcttttctccctttgcttggctcttattctctctcctgctgccctgtgaagaggtgtcttccaccatgattgtaaatttcctgaggcctccccagccatgcagaactgtgagtcaattaaacctcttttctttacaaattattcagtctcgggtatttcttcatagcagcatgaaaacggactaatacgcagctataagccaagaaatactgacagccaccagcaggtggaagagatcaagatgggattctgctgtagagtctctagaggtaccttgctgacactttgattttgatacccttgatactgatttcagacttctgacttctagaactatgagagaatcaatatagtaaaggtaaatcgtgtgctccttgttatcagcatctcttctatttagtattaccttttccacagagtctaactcattgccttcagtattataactgtgtttcaattacgtattgctgcatgacaaacaaccccaaaatttaatgacttaacaatttatcatttctcacaattctgtgtggcaggcgggtttagctgggcagtccttcttcgccatgtgttgtcatctgggatcactcaggtggctgctttcatctgagacctcagctggggctgatagaaccaacatggcttcacactcacatttctggggctggaagtagaagcataaatgactgggggccaaagtggcctctctctagcagggtagtcaggacttcaagagggtgaacccagaagctgccatgctttgtaaagcttaagccagaactagcacagtgtcacttctgctgcctgatcaaagcaagtcatgaggcatcctagagtcaaggaaacgggaaatagacccacttcttcgaaggaaggaggcacttacatataaggaacgatagaagtttgttgaccatctttggaaaaagtctatcagaaactgtttagtaaatgattattgaattaaactataacagttaattgattgtgagattttagaaatgattttttaggaacattttctaaaaaagaattcctagttaaaaaatacccatgtaagctgcccaaatgggaccttgcacacatgaagaattcaagagattgatatttactcaccaactcactgtgtaaaggagtggaaatgtgtttcctggcccacctttgggccagtgacttcacagggggcgtggcagggctcttccaggaccaagacctttcacttccctgtctcaggatagtattgtaataggcagtttagtgatttgggaattctccaccttgaaagcaacttctgaaagggaaggattagaaaaacaacacgtcattagacaggcatgacaacatgtgcctgtagtctcagctacttaggaggctgaggcaagaggatcacttgaacccaggagtttgaggctgcagtgagctctgactgtgctaccgcactcttagcctgggtgacagagcaagactctgtctcaaaaaaacaaaaaacaaaaaaagtccaaaaatcctatggctacctacagaggatcggcagggaaacaaggatactggttggagccctgatcagtcagtgtgctcaaaacagaggccccgaggaggatgctttccttcaaacatggtctgcctgaaagggcttcctggtagatccatcgctatgaatacacagacttcctgagtgtgagattctgaccacgggactcctgacatctcttttctgatcactcattgttttgttaactactctagggagaaaagctagtgtcagcccagtctgaggtagggattggattccaagaacagaatctgagaggattccaagagcagaatcagagatgggcttcctgatgggatttcaaactgagatttctttttattagttgtttctattttattagtttgcatttgatcatatcctttgaaacgcatgtgcatgctttgtcttctttgtacgtttgtttcctttgcgggggatggggggattatttttcttaagatgaggttgctgtttttatcagcaatcactgtggtgaggagacacaggccgttagatgatttctctcttgtggggtggttttataggccagaatctagggaatagctccgttttaatagtttattggcttcccgattgaaatactaactgaaaacccccaggctttggccttcagcatttgttttcatccagtgaccagatttatggtgtttgctccatggcctgtgaataagtcctgtttttaaaaactggacacaacccacacctttactactgtttcctatgcagttccttactcctacatggtggctttgcttgcctttgctagcttttctttttatacctctgtacattactctgttgatccctattcctgagatgatcgagaatgatatgggatgtgtgtataagaaatgggtgtgtgtggatacctccccccccacctttttttcaacacgtttcaccagatgcctttttcactgcacaatagttttcactggtatactttttgttcagaagcatgtgcttctggcattgcaacttttcatatgtgtggcagatcttgaagacagggtttctatgagaaattggagcttggtttaaattttttctaggctgttagatggcagattggattaaaagcctaccaaaatggccaaagctcagatgctctaaaaactcaagaactagacccttggcattaccaagattagatgtggaatatgcagacaaattgaaatagctggagtagcagcgttccacctatggcttaacccagatgggagtaagttgttcttggtgtcaaggttagtgctccggaggaatgtatggccagacaaatgttcacacacaggagaggcacagagagtgtaaaacacagagactactatgttaaaatggcttcagattgatatggaaccattcttgatatgctagtaagtgcagtaagctgattataggacactatatgaggagggaggtgtagatggacctacatcaaaacataaaactggtggctaaatttagttggtaagttcgtggtgatttttagatttctctttgtggcattctttattttttcctcaataaccatatagtgctagaataatatttctaaagcttttaaaataaaacgaaatggtgcctggcaggtgttttctttgattcagtaaacctctgttgctgacctgttttgtccaggccctggctgtgggctctgtggagtctagcaatgaacggatcatgccaagggttgccttgttggtagaggttaccgccactcttgctctctgcaccttatgctttgtgctaggcaagtagagatctgcaagtagcttctgtgtttccccaagggcctctcatcagttgtgcctgcatatccttacctggtgggagagggaataactcaccttttgcatagtctgacagttctgaatttaaagctgcttcattctcactctttatcctgatttgtttgttttcacctgtctgttttatcccattcacaatttttagtggtctccttttttcttcctaggagcttgaacttacagagcttcagtttttcctttttggctatcacttttattgttttccaggctggtttttgatcacatagataaacgtttgaaatgcctgtcactggagaatttacccccagggctcgctatatctgcagtggtaacttattagcctgtttgcttgtttcggtgaactagaattgaactgtttgtaaaccagtgagacaagcgttatttatttgtgtttaagaacatttcaagctctggcagggtactcattttattaactcaaatgatgattctgaatgccactacatttatacctgatgatgcattttgtgtaattattaatgtgttactatcttggtcataattccttttctccttgcctgtcttaaggactctgtccttgtgtttcgcttcactcactcggcaactgtttagtaggcaccagctgtaaactgggcattatactcagtatcttaaatattgtggagaaaatgaagtcagctatggtttcttcttgtgcagagtgtataatctagtgggcaaaataagcaagaaaacaggaagtttcatgtatgacatgctgcctgtgttagggaaagcaaagggtgtagtgtacaaccgaggacaggtacctaagctagacttgagatatcagggaatgtgtcctggaagaagtctgcctaagcccaaagttgaaagattatttggagttagtctgacaggaggggtgcggtgggcagcagaggcggagagtggaggtgttcctggcagaaagtacaatatttgccacaatctagagggtagagagagcatagaatgttgatggaactagaagacatggtccttaacctacagaaatctgtgctctagttgaggtgataagggacacatttagtgaaggtccatggggtcaccatgtttctactctctagcctagtccatctgctcttgtaacatatctctcctgttcagaaactgtcaaagcccataagacagcaaagctgcttagcttggcattcaagtttctaaaaaaaattaatgccagaaaaaaaatttttgtaccttctttcgtcatgaagtcctcttgtcatccagtcagcttaagtacttttcccttgcatgctgtcttctctcctttttaatccagtcttactaatttttcaaggctcattttggtttccattttcttttttctgtctttgcaactccgagtctccctctgtcgctcacccaggctggagtgcagtggtgtgatcttggctcactgcaacctccgcctcctgggttcaagcgattctcttgcctcagcttctggagtagctgggattacaggcacgcaccaccacgcccagctaaattttatatttttagtagagacagggtttcaccatgttggccagagtggtctcaaactcctgacgtcaagggatccgcccacctcggcctcccaaagtgctgggattacaggtttgagctactgcagccggacttggtttccaatttccccacaaaactatccataatgatgtccccgacccaaatgatatattttccaactccaaactcttattgtaaatatcattcacttgactattaaaatggtttgccttatgctattagttatattgtatgtgaatacctgtcttcttaaccaggttttaagctccaagagcactgactctcttttactcttagtatctcccataggattgcgcccaacatgaagcatgtaggtactttaaaaaaatatttgctacttttgtgaaaaaaatacgatcacattacagttttgattaagtagcaagtgagagagaagactcacctattctaggattcagagcagggagattcaaatatgacctaaaatggtcctatgatcttggccttttaaagtaaggctagattacagaccttacatgggcagtccaaaacctatgaaattcttttatatggagacactattataaatggtgattcttctctcagtacaaccatgaaaactaatatggtcatggttagttgaaggctggtgttgatatcagcctaatttctggattcaagatgctgtagagtctacagtagaccttttagtgtagttgagaatcagaagtgagtgaagtttggataagccccttaaataattctggttctcctaccctctacctattgagagtctgttttataatacacaagaattgttaatgttgcatatccttcagacatactatgtaaatatttaaccaagtctttactagcttttggctaatgcagagttgagatgatgctccctggcgagtacatggagctcagctcttttgtgtttgtagtaaattagaactctggccttttagctgaactaaaccagaaatagggttgacatttctgtgttgaggaacctaagaatgttagaaggacacttcctgtatgctcagagtgcttgaacaaggttgaaattttctgtagaaaataattttgatatttttaaaccctgacaaatgcatagttgatacttcaaagtccgcaccatcaggcatggccacaataattttaacagtatacttttgaaaagatgtagtcaaaaacctactttgctcttaaaaacaaaacaattacttaaaacgttcactgaagtttaattttcagtaagtaccttctttatatagcttccaagataaactagttggtaaatatttgctaaggtaactgcatgacatagcttgctgtttgggacaattagcttaattcaattaaaagaatgactttaatcctagaatagtagctccactgcccttttctcagagtggtattatggtcagcagagccagttatctattaggcagtttctagatcatagtgatagaatcatacggtgtgcataagtgagattacgtgtgtttcttactcaaccaagaaatagcagaccacttatttctctggaaattaataactgattcctcaagaagacatatccattgcctttctgtttgtataatgagagattctgaatgagcaaatatactcagggatcccaatactaaactcaaagatttacctttaagtgacttctcttcacagaatcaaaagccaaggaaaggacattaacagtggaaattgatgttcttgaccagttttgctctgaggtggtcaagaatataacaatggcctgtagtggaatgattttgctttctccctgtgtaaaacagtgatcctgtaaaacccaagtttgtaatttattaacaaggaaatgtacatataatcatttgtagctgcaagagactagcaataaccaaaaggcttgtcattagggattaagtaaattacagtcaatcatgcaatagattactctgtagccattaaatggaagaaaatagatcagtgtgcctgacatggaataattttgcagattaggtgaaaaaaaactcaaggtgcagaaaagtgtatataatgtgattatttgtaaggaaaaaaactacaaactaaaagtatatacctgtatgcactgaattttttaaaataggaaagctgaaatgctattacacagttctatatgaggaaaggcactgtggggagtctagtgtgtattttttaacatttgcatttttactttttccattaaaatatctaataaataaaaaaggaaatgaacatattttggataaaatgttcaataaatatttaatgggtctgtaatttggaaaggagtaaggatttctttttttaaaagactttcgattttatgaaataggtaaaagaatatgtataaagtatgtataaggtttaaagaataacaatgcaataaacaccttggatctaacacctagtttaagaaatagaacattacagtagtcttcccttatctgtgggggatacttttcaagacccccagtggatgcctcgaaccatggatacgctgaaccgtatatacactatattttttcctatgcactcatagctgtgatgaagtttagatattaggtgcaattagagattaacaacaataactaataataaaatagaacaactataacaatatgccagcatcacactcttgtgctttggggccattattaagtaaaataaaagttccttgaacacaagccctgtgacaccaggacagttgatctgataagagttggctactaaatgactaatggctggtggcatatacaacatggatagctggatagagagctgattcacatcctgggcagaatggagtgggacagcatgagatttcatcaccctactcataatttataaattaggcacagtaagagattaacaacagtaactaataatgaaatagagcaattataacaatatactataataaaagttaaacgagtgtgatctttctctctctctctccgtctctctcaagatctctctatagatctaaatatctaatggcactcagtttaaaacttatgaattgtttagttctggaattttccgtttaatattttcgaaccatgtttgaccaagggaaactgaaaccaaggatgaggatatctatggtttcgctttctgtgatttcgttactggtcaccagtggttcaaaaatattaagtggaaaaaccagaaagagacagttcataagttttaaatgctacgtcattcacttcactttatcttatcacataggcaatttatctcacatgataaaatctcacatcatcacaagaagtaggatgagtacagtataaggtatatatatagagagagaccacattcatttaacttttattacaatatattgttataattgttcaagtttattattattgttgttaatctcttactttgcctaatttataaattaaactttatcacagctacgtatgtacaggaaaaagcatagtatatacacagttcagtgctatccagtttcaggcatccactaggggtatggaaatgtatcccctcagataagggggggactactgtaatgttccacttctttagctaggtggtagatccaaagtgtttattgtattattctttaaagctcacatacggggactactatactacagtttactcatgttttgttgatgaacaagtggctgctgtgcatatgcttgtacaagccttctgatgcccgttttcaagagtttatctaggccatttaccttggagtagcattcttgagtcactaggtaaacacatctctgactttcaagaaaatcctaaattatttttcagaactgtagtaattttcatttccatgaacagtattctgaaagattcaatacgtggtattatcagacttattagtctttgccaatttgagggtataaaatagtctcttggcatagtttgggtttttttttttttttttttgagatggagtcgctctgtctcccaggctggaatgcagtggcacgatctcggctcactgcaagctccgcctcctgggttcacgccattctcctgcctcagcctcccgagtagctgggactacaggcgcccgccaccttgcccggctaattttttttaatttttagtagagacggggtttcactgtgttagccagcatggtctcgatctcctgacctcgtgatctgcccatctctgcctcccaaagtgctgggattacaggcgtgagccaccgcgcctggccatcccttggtatagttgagcatcctttctactgtttcttgaccacttatgtttattttctgtgaatttcattttgataggtgtgtccatttttatattatttgtcctttattcagtgatcacttgagttctttgtatattctggatactgattatgtaattcttagatatatatatacaaatgttctccccatttgtggcctgtatttttatttttaatttaaaaactttattatccagagggagacactatatcttccaatgctgttcattatataaacatccttgaatagagtccggaaagtccagaacaaaaggcagtcagtgcttcactttgcaatagtggcacagtggcagtaactcatcttgtctctcaacagcatctgtctcccatttctggtgaaaattctagtgaattctcccatgaatacatcacactgttggctccttcgattaatctaagtgatgagttggcaccaaatccattcagtttgtctcatacaacatttaattaaggttactaccagtaggacaccaagcagcaggatgagctcagctttcagtattgacatcaactatgccacccagcatctcagatccaatcacttgtacaaatcccagaaaccaacagggtctatggtagaaactcaaaaggctgtcttttgaagtttttgtattgacctttccatttagtccaagccattaagccaggtacagcagaatgtattagtgattatacagactttatcttatcttatcttaacctgtagattggaagtctaagaaaatttttcatttatattgttatgacttgccctgtgaattgaagcaaacctgagtggctttatgggctgaagtgctatcagtgattacctcagttaaaatcagctgataaattttgtaccatgtttttaattgaatgactcttatagcaggagtaaccaaccacagggtgtgcaaaaataatgagttgcttatatctctgggaagcttctgtgaataaccaagcataaccccattttggagagatcttcgtagacatctgagagctatatgacctactggtggtatttccttaaacatttgaaatttgcttacagccacccctaaggtgcaaatcaccgtgtttggttgggggaagagttaatgcctgctttcacaaaagaaatagagtcccaaggacacacttagtactcctgtaaagaaagcatttgtttacagtttggggagatccctacgtcagttgaggagcatatgttgatagtgcctccattgaacaatcagctggtaaatcttaaagtttctagtttagtccaaagaatgtattctagtccttggttttggaaggattgcttaagtacagtcattccaacctatccagttctgcccacaccaacagctgagtggcattcagctgtcccttgaaatgattgagctatggctacagaaaagggaaggacattcagagatattgacaggtgcttggagccaaggccataacatatagtttctgataggcttctcagtaaggttaaggggaaagcaatcaaattgtgcttcaggtcatctgagggaggctcacagacccagcagttggttaaatttaatgtgctcatgacagtttgggggaagagcagagcattttccttggtgaggaaggctcttggggcaatttcaaaaaacagacaccatttatgttcttcctcccattgtacctcccggggtctgagatagtctcttcccaggtgtcaaggttattctctctacttcctcaaaatcagttctcccatttcaatatttataactttgtcttttttccagttgctccctacttgcaaccagacgttttgtctagaatagtcaggtacaagagaaacaaggcatttttataaattttacagagaccctttatgtactcatgggccactttaggaagactcaacaagctgtgtactcaagcaagtagtcattatcttatgatttagaactaggttaatccttttaagagaatccaggtggctaaatagaattaagttagaatttcctagggctcttttggccaggctgccacatggaaggtgtactaactaggctgcctggatttgtcattaggggaaagaaagaaagaagcattatgccaggaatgctcagggcagaatcccaaattttcaaaataggttaaaaaaaaaaccctcatgcatttcttttttcttttctttctttttttttttttttttttggtggcaagttctcactcttgcccaggctggagtacagttacacgatctcagctcactgtaacctctgcctcccaggttcaagcgattctgtcgcatcagcctcctaagtagctgggattacaggcagatgctacctcaactggctaatttttgtatttttagtacagacaggatttcaccatgttggccaggttggtctcgaactcttgaactcaagtaatttgctggcctcagcctcccaaagtgctggaattgcaggcatgagccaccttgctcagccctccctccctccctccttccctccctcccttccttcctcccttccttccaggagtctcttgttgcccaggttggaatgcaatggtgcagtcttggctcacttcaacctccacctcccagattcaagtgattctcctgcctcagcctcctgagtagctgggattacaggcgtgcaccaccatgcctggctaattttgtattcttcttttagtagagatgggatttctccatgttggtcaggctggtcttgaactcccgacctcaggtgatcctctcacctgggcctcccaaagtgctcggattacagtcgtgagccgctgcgcctggccctggctatttgtttatgctgttttaaagccttgaagtcaatggaatttaatttgtatacgtagtagtgaaacaggaaaagttcccttgtcccccttgcagggtgtgtgagtccccctcacaaggtgtgtgatgggattgtagctcgcttcttagcgcccagctgctcaaacctgtaggggaacatacagacaggcaggctgtggggctcccactccacagcagtgtcgaggggtgaatgtttacggctgaagccccagtgggtgtgtgttacagagtgctctttcagtttagctgtccataggcagcttgtgttagtcagctcaattagacccccttgccttgttgcaaggacagagggctttctgtatcccagggttcttgccttgatataccggaagaatttgatcacacgtaggcttggagaattagtccagggttttattgattggaagtagctctcagcagatgggggaaccagaagggagatggttttccgctggatttgggccactcggcggcctgtctcttttctgactgccctggccaaactcctcattgtttcgccagtcgatggcctgctggtgcctgttggtgtattcctgccatccagccgcttgtgtgttcctccgcccatgtgcccctcttgtcatccagccgcttgtgtgcctgcgtgctagggtcttgggggattttataggtacaggttgggggcatggcgggccagggtggtcttgggaaatgcagcatttgggcacgaaggcaggagtgcctgtcttcacctaggtccgtgggcacaggccggagacagagcctccttcgccaggaaccagcccttctcctcccagcacttccctgccctcttctcatatcagtgggagcttgggatccaattgtaattttgtctgtgtggataatcagttaccacactacgtttctctgtgatctgcagtattagctcttacacaaatcaagttttatacgtgtattaatatatgtctgctcctgtgctttctatgctattttattggcttacttgtactcatagtcctaattacatgagtgttatggttttttttagctatctgggtgagtcctccaaccttgttcttctttaagattatctttgctactcttactcttggcccttgatgtgtctatatacaatttaaaatctacttctcagggctgagcgcagtggctcatgcctgtaatcccagcactgtgggaggcagaggcaggccaatcacctgaggtcaggagttcgagaccagcctggccaacatagtgaaacctcatctctactaaaaatatgaaaaattagccagatgtggtggtgcgcacctgtagtgccagctactcaggaggctgaggcacgagaattgcttgaacctaggaggcagaggttgcagtgagccgaaattgcaccactgcactccagcctgggcaacagagcaaggctctgtctcaaaaaataaataaataaaatgaagtcttgcagacacacacacacacacaattactgtttttattggaattgcgttgcatttataatcaatttggggagaatgtcatctttataatatggaatcctctcatctatgagcacagcacatctcctttttttgtttgtttgtttgttttctgagatggagtctcactctgtcgcccaggctggagtgcagtgacgtgatcttggctcgctgcaacctctgcctcccaggttcaagtgattctcctgcctcagcctccagagtagctgggattacaggcatgcaccgccacacccggctaattttatatatttttagtagagacagtttctccgtgttggtcaagttggtcttgaactcctgacctcaggtgatccacccggctcggcctcccaaaatgttgggattacaggtgtgagccaccacacccagcagcacatctcctttttaaggcatatcattttttttttccaaaaaaaatctcccgattaaaaatatgaaataccaatgtggaaaaaaagaaccttgacctctatctcacactatacacaaaaattaattttaaatggatcatagacctcaatgtaaaagctaaaaccataaagcttctagaggaagatatacgatatctttcttaggtaggtagagatttcttaggcatagaaagcatgaatcataaagaaaaaaattgattaaatagtgaactttgtcaaaaattttaaaattctcctcatcaaaagacattattaaataagttggcaagccacagactagaagaaggtatatgccatgcatatatatgaccaaggaaaagcaacctattaaaaatgagcaaaaatcttgaagagatccttcacaaagggtcataataatgaccaaagcacatgaaaagtgctcaacgtcattagtcgtcaaggaaatgcaaatcaaaatcatgggagatacactgttgcatacccacaaggatggctacaaaggaaggaaaaacaaaacaacagcaaatgttcaaaggactgtagaaatctccatcagaaatctaccttactgttgggagtgtaaaatggtataattatttcaggaaactgtcagtttcctaaatggttagacatgttacagttttattctcggatattaatccaggagaaatgaaaacgtgtccttaaaaagtcttatattagaattttatagcagctttattcataatagtaaaaaaaaaaaaaaggtaaagaacccatgcctgtcaagaggagaattaataaacaaacttacagattcatataatggaatactactcaacagaaaaagaaccagactattgatatattgaataacatggataaatttcataaactctgtgctgagtgaaaaaagcaagccaaaaaaacgtattattgctgggcacagtggctcacgcctgtaatcccagaactttgggaggctgaggtgggcggatcacaaggtcaggagatcgagaccatcctggctaacacggtgaaaccccgtctccaataaaagtacaaaaaattggccgggcgcggtggctcacgcctgtaatcccagcactttgggaggccgaggcgggcggatcacgaggtcaggagatcgagaccatcccggctaaaacggtgaaaccccgtctctactaaaaatacaaaaaattagccgggcgtagtggcgggcgcctgtagtcccagctacttgggaggctgaggcaggagaatggcgtgaacccgcgaggcggagcttgcagtgagccgagatcccgccactgcattccagcctgggcgacagagcgagactccgtctcaaaaaaaaaaaaaaaaaaaaaaaaaaaaaaaaagtacaaaaaattatccgggcgtggtggcgggcgcctgtagtcccagctacttgggaggctgaggcaggagaatggcgtgaacccgcgaggcggagcttgcagtgagccgagatcccgccactgcattccagcctgggcgacagagcgagactccgtctcaaaaaaaaaaaaaaaaaaaaaaaaaaaaaaaaaaaaaaaagtacaaaaaattatccgggcgtggtggcgggcgcctgtagtcccagctacttgggaggctgaggcaggagaatggcgtgaacccaggagatggaggttgcagtgagccgagatcgcaccactgcactccagcctgggcaacagagtgagactccgtctcaaaaaaacaaacaaacaaaaatgtattattacatttatatgaaattctagaatagacaaaaccaaactgtaatgatagaaatcaaatcagaggttcctttgtggggcgggagtttgctgggaaggggcatgggggatctttatgggatgatggaaattttctgagtcttgataggggtgtggattacgagtgtatgtatgtgtgggttgaatggtacacttgatcacagcattttgctgtgtgtaaaaacgtttcagtttttttaaaatgtgatattctggatttcaattaataggaacataacatgtagagctgataaaaatgggtaggttagggaatatttatgtcaccccttcggagtaattctttaatagttatggagacagtttgttcctaaatgccatatttagcttgagctttttggtcagtggtgcagcctgaggaactattctactttcgtagttcaagagaagtttttataaagttgaaaaagataattcttacaagttcagcaaggattagatttccagaacttcacatgccaagactgtacttctcataaccatactccaaaccagtggttctcaatcaggggccattttgtcccacaaggtatatttggcaatgtctaaagacattttcattgtcatgattgttggggaggggtgttgtgctgctggcatctagtgggtagaagccacggaggctgctaaacatcccacaatgtgtaggacagtcccctgaaacaaagagttatttggtccaaactgtcattggtgccagggttgggaacgcttgttctagacctgtccttatcactgaagctgagtcagtctcagtcaatctggtgttgactctacttatagtccaaatcagttgtggaaacttggcattggcacagattacatatttcttccctgataaaatttaatatcaaatatttgtaaacatacataatcttaaattttgagataaaagttcatggattgagagcacttcagaaatcagaattaccatttgtgttgattgttaaattcttaagatgctgtagattctgtttttaactgtatttaattaaatatccaaacaaccgtacttatcttcctttttttaaaaaaaaggctttattgtcagatcaaagggaataaatgataataaattttttcctccttctttcacagaatgacagggagagagtttttctctcgtttcccagaactctatccttttcttctcaaacagttggaaactgtagccaatacagtagacaggtaagaagagaattgggtggggcaaaatgacctcaaggatgtgaattaccttagtaattgagattttccctctaggcagctgtttttaataaaattcttcccttttttaaatttgtttaaattttttccttgagacagggtctttccctgtcacccaagctggagtacagtggtggccaccactccttgcccatttttgtattttttgtagagatggggtttcgtcatgtttcccaggctggtctcaaactcctgagctcaagcaatctgcccacctgggcctcccaaagtgtggggattacaggcttgagccactgtgcacggtcagactgcttccttgcataaaattggcttttttattaaagtgcttttttgtaattatatcatattgcttggttctctgtagtaaatttgtacctgaaaagttatgtaaaatcctgtctttatattttaaaaatgctattttatgttaaattttatcaaacttaattccattttcggtggtacagaaactaggaatcacatggtgatttcttctgttatgaattattttcttcctatttttaaaaaaatctgtgtttacatattgagtttgctttatgcatacctgtcattttttattactggcttgttgcaacttaccattgtgaaactatagcgattagctgactaatatgatcacttgtgttcagaaatggttcttgtctacctgagcagaaatggccagtgttcttggaaacacagagcaaagccattacgagggctttccagtcttatagttcaccattgtcttaaaaatcacattctggctggtgtggtggctcacacctgtaatcccagcactttgggaggccaaggcaggtggatcacctgaggtcaggagttcaagaccagcttggccagcatggcgaaaccctgtctctattaaaaatacaaatattagccaggctggtggtgcgcacctgtgatcccagctacttgggaggctgaggtaggagaatcacttgaacccaggaggcagaggttgcagtgagctgagatcttgccactgcactccagcttgggtgacagaaaaatactccgtctcaaaaaaagaaaaaaaaaacacacacacattctgaagctggtagtggaatttttagtatggacatcataaagcatgtcttttgtatttttcctataattttgcacttggtatgaatgtacactaattgtttataattagaaaataaaagtaatgaattttacttctggttatgatgcatttgctcacattagtagtttatgctaatgtgcttttctggcctttagtgactattcatgctttcttaaatacatttggatgttgaaagtttcacatttcatactgtggaacaggcacgtctctactgtaggaacagttctaatcaaaatagcgtactctaattatgtaaatgataagctttgagaagaggatcctgtacgaaagcccatttccctgttttgctagtagttttttcttatgatgcacatttgggagataagaagtgaacgtagaaaaaaaaaagaaaaaaggaaaactatccccttgattgtggagtctcacttcatatacataattttgtttttgaaatggagtctcactgtgtcacccaggctggagtgcagtggcgtgatcttggctcactgcaacctccgcctcctaggttcaagtgattctcccacctcagcctcccgagtagctggaattacaggcatgcgccaccacatcggctagttttttgtattagtagagatgaggttttactgtattggccaggctggtcttgaactcctgacctcacgtgatccatccgcctcggcctcccaaagtgctgggattacaggcattagtcaccgcacccggccatatacataattatttcatgagaaaaatgtttgaaggaggagtgcttcactacctaaatgtgaaatctttcatgtgtaataattgttgtttcagtgatatgggagaaccaaatcgtcatccaagcatgtttctcttacttttggtgttggagagactctacgcttccccgatggatggtacttcttctgctctcagcatgggaccttttgttcccttcattatgaggtagtgtcatgctgtgtagaaattgtctaggttggcgtgggagttttacgggaatattttatcttcttcttatttcagaaactattttatatatatcatatatattttatatatatatattatttgtttgtttgtttgttttttgagacggagtctcgctctgtcgcctgggttggagtgcagtggcgcgatctcggctcactgcaagctccccctcccaggttcacgccattcttctgcctcagcctccggagtagctggggctacaggcacccgccaccacgcctggataattttttgtatttttagtagagatggggtttcactgtgttagccagaatggtctcgatctcctgaccttgtgatccgcccacctcattctcccaaagtgctgggattacaggcatgagccaccgcgcccggccatattatatatttttttatatatgtaaacctattgtatatattaaaaactattatatatataactattatatatattatatgtaaaacttttgtatataactattgtgtgtgtgcgtgtatatatatataacttgtatacacacacacacacacacacacacacacacacaaactttgggaggggtcttgtgaaagcagaggcctgggttttcctgccattgcccccagtgtttcagagtaaggtgcttatattgtgggtacaggatctcattagaacctgtgtaagtaatgttttctttgagccctgtctgctccaaggcaggtggatggtgttgataggagatactccttttgaaagacatagccccatgtttgcgttattcctgtgttgagcctggctagcacggagcaggcttggttctggtatgtatcttctgtccacgggttcgagaggatgtcaggacatctgcctcttcactctggaagagtctgcgagccggtgcaatgggtggcatgtaaatggtaatgccatgtggcatgaattcccactcgtcttctcttttacgtttgtagtacctgaaaaaagccatgaatatagagtattcatgaaataatataacagggttctcttcttttagagcctattaccacttcttgtgttacatcttttcaggcatttgccgtcttctgattactttgttcattttggatcaaaggcctaaatatgtaggcctccaagaagtattaaaattttctcatgaaacctttcagaagcctatcatattagttagctattacctttctgcttagctcttgacaaaacagtaccttcatttttgtgtttctaccaaaaattgaagtggatttggagcagaagggtaagaaaccaaactcaagagagtatttcttatgtatgtagtgtcctaggtttcacttccttgtttcacagagctgacttatgcattttaatgtgagaaaaccattaaacatgaggttctggcatgcgcttgcagagctatttgtttgcgccaagccttggctgtggctgtgttatctttgatcacagagatgactcaggcagactggtttttgtttcctgatatacaaagttaccagtctccttcatctggcatttggtgattcattttaggaatttgggtggtaaattttactttcaggggccttaaaaattgttctttcatgaataagtggaaagaactaagaaatgttttcagaaagttgatgcaaggaggaaaggcatgtgcacagaattgcagtttacattagaaacagagatttgctttagaacctgtgctctgtcttaagaacattgaatttgtggaagctttttactactcagtctgttgttcattgcatcctagaaataataaattactacattgaaagtacctttcagtggtacctgaaagtacctttccaaaatgttgcttagtttacatataatcagaatgctgatactactcattatattcaaagtatccattatataaaacaaagattgcattaatatagaaaatttaaatattgctttgaagccagtgtacttagggcatcatttgttaacctctaaaaatacaaagtaagaagtttgcaatcagtctgttcttccagtgaaagaaaatgctgcggttgtagttgctttcttccagtaagtaaggtgctttatgaagtagattcatagaacatcaccaacagcagaagtgccaccaaccaaaatacaaggttattttggtgtaacagaaagagcacatctatcactcttgacaagccctgcactcttgggttcaaattgtagctctgtaactgccttgcttgctctctgaacctcaatttcctcaacttgcaaatgagggtgataacacatcttctgagagtcactgtaagcaaaatgtcctgtaagcagaagcaccacccttgattccttaagtacagagcctaggctctgacttattgactgtccatgtgtgttatagaacagtgtttctaaaactttaagatgtaaacatatcacttggctatcatataaattctgatttcagtaaatctgaggtgaggcctgagagtccgacttccaaatggtcttccagataatgccactgctgctggtctgtagatcacattttgagtagcaaaattaaacttgggatattaaatttaataccatcacacacacacacacacacacacacacacacacacacacacatacaattttaacaagctagacagtagtagcttattaaaattggttaggcagtttaaggaatttattaagaagtagattttgacccaggaatgcagaaaacaagaaagaaagtgttctgagcagagaagtcagtaggaagtagaccaacctttgttgagccccgtctttctgccaagtattgaactggtcattttacttacagtgactctgagaagaggtgttatcaccctcatttgcccgttgaggaaattgaggttcagagagcaaggcagttacagagctagaatttgaacccaagagtgcagggcttgtcaagggtgttagatgtactctttctgttataccaaaataaccttgttttttggttgccttttgagtagccagtaacttagctacacggaatggacctatagggtctgaaatgtatgcaactgagagagatgaggagcctatatccacagctgctgtatctgagtacaggctgtcttctggatatagacgtaatgtctctaccaatggtgggatctgttccttattttgcttttcctgtaggaaaagtgactgattggattggttaaccatgtgtggcacatggtgacaatcgcctggggttataggactggtttgtggccagatacagtagaagcctggctcttctttcttggccaccttctgtggtaaagtggaaggccctagatttagttagtttggggtttcatcagcctaccacagggaaaacccatgctaccccaaaatgttcactggcgaggtgaactataaacagatttttaaaaagcagtgaatgtgataaaactgtatgcatttgatttagatgacctctgagaatattattcatgaagaaagtggaaggctgatcataaaacctgtcattccaggcagtgcttgtggttctgattgtggtaaagagtgggctgttttgacttggggtaatagctaaaaagatggatgggtgtatgcacagtgggtcagcagtgttttatttttgtaccgttgttaagggtaatttatgtacttggaagggttttcatcaggctcatggatactatgagtttggccaaagaaaaaaatttcagtttgtgggagtagtgcaaaggttgctctgactgctaaaagtgaattgcacaatgagaagaagattaaaagcgccaacaagagctttttgtttccctttgatttatgtgtacttacctgctatttccttcctctctgtaaggtatttataagtattatatgtagttttactcctttatcccatgtttaagagtatacctaaacatatatgccattatgattgttgcatcctcttgggacagaacttataatgtcaatcccaacatcttgtatacaacttttaaaaaatccagtgtattttatgttctgatgttgtgctgcatccagatacaaagccctttaccatgtgaatgtgatgctttcaatttaagaccattaattcattcttcagttcaggtaccacaaagcagaataattcatgctttaaaaagaaccttgactggctctctgaatgcagctcaccagggcctgcttctctgggctttctagagactagaaagtcttttcagaggccaaaaagtccctgggcatacatctctgagttccctttcacaagcaagtttcaagttccagtcaaagagctctaggtaaccacatatgcctcaaacctaggaccatagaatcctgaacaaaggcccaggagagcttagacgaatcaggtctcagaggccgaggcgggcggatcaccaagtcaggagatcgagaccatcctggctaacacggtgaaacctcgtctctaccaaaaatacaaaaaattagccgggcatagtggcaggcgcctgtagtcccagctactcgagaggctaaggcaggagaatggtgtgaacccaggaggcagagcttgcagtgagcagagattgtgccactgcactccagcctgagtgacagagcaagactccgtctcaaaaaaaaaaaaaaagaaagaaagaaagtaaagctacttatttggtaggtatatgaagtcaaaagactgatgctggtgacatagcttcaaatgctggaaagtccaagtgaaaattcttttgaggagatagggaaagaatctcttgcaactttatagcatgatgctttatgattatgctgttaatggctaaaagtagccataaaaaaaatgaaggcaagctagattgcatgcttatcaaatttgtgagcaaattaagattcaaaataaccttcaagcataggactgacaaacacaaattcaggcataagaccattacctctgaatggggaggaaaggggtgaaattgaggagccatgtactagaagctacaattttatttgtgatgtgttcttaaattgggcattgggcaaatgcttgaatgtcatcctattctctagattcttttcgttgttgtcatcattttgtatgtctgatgcagttcatcatttaaaagtaagattcgaaatagcctggaccagcctgggcaacataaggagaacctgtctctacaaaaaattttaaaaattagccagacttggtgatttgcgcctgtagtcccagctacttgggaggctgcggtgggaggattgcttgagcccaggaggtcaaggcagctcaagtgagctgtgattgggccactgcactgcagcctaggtgacagagcgagaccctgtcccccaaaaaagccttgaaagactggattgatgggatgagactatcaagataacatttaatagagatatatatcattctgattttttaaagaaaagtcaaaattatatacatacaaaatgagggctatctggcttcatagcagtttttgtgggggaaaaaatatcttggtgaatgagatatcctggtgaaccatgagaaagcagcatgacactgttgctgcttccagatagtggaggctgtagtccccctgaactctgttggttagcctaaacccacattattctccttattattctgttctgggctccccattttaggaaggtcactgaagaactagtatctgtcgaggggaggtgaccaagatgaggaggaaaccaaacatctggaaacagttagactggagaagacttagtggcaacatgataatggtctttatatacttgagagactgccatatggtagaaggcgcataatttctcttttttgctcccaatgggaaaatggaagatagatttcagcttttaatttaaagaagaattttgtgaaaattagtattctctatcaaggaaaagaacatatttccataatactgagtttgcccatcagcaaaagtgttaagttttcaaggaaaactgatcacatgttgagcatatatctgcagcgcacctgaggttggactggatatcatcaaggtatctgtttggcatgccttatttcagaataggtgaacaactcagctgtggattctgaatgttcagtgaatgaaatgatcaacctgcctctaatcctgtgacaatatttgtacatttttgtttatgggtccttcgatctctcaaagaaaagaagttgggatgccattcttggcatggcccaaaaagtcacagtggtttgctcttaaatggcaccctccaggaattaatctactaaaatttagcatttaagtaacttctgtaactgtgttctggatagttctgaaaacatatttttggcctatgagatgttatgtctgaaaagcattctttattaatttaattacctttttttgtggttcctgtatttttctccattccagatgttggcttaagccacattttctgacaagcaaaagaacatctgagtctttgagaagtcagagatgcttttctaaagagtggttatagtagataactctttattgtcccaatttcccaaagtatcttgaacagagttgcctggagagagagtacaggggtctccaagccttgctcattacaagtagaaacacctgagaaatagggctttgccagtactgttgacatagaacttcctgccctggccagcactctacctggtctgtggttactactaaattccatgaggttcagagaagggaattataggaaaggagtatgcccccacccttcccccgctgcccagccatcctaatctgctaacagttgttgggtgaaaaaagggttctgctatcccataattctgtggaaaccctggccccttggtttcactatgtgactgtctgataccaggtcaggcttgggaccagattgttgaggcacaggtgttcagtgctgctcagttttcttctttgcttataggccaaacttgcaaaacatgtaaatgcccccagtgttatcttccatggggtatttgtatattacagatacatacattttgaaataaagcagtaaaactctaatggtggtgttttaggccttatatagggaggatctagaagcagagattggaaggttgtttcctattgctggggaaatcacattgtttgggcagctacttactctgcctcctttttactgtgcctagcactttatttggagggctgtactcatggccctctgaatttctgaattctacccagggtagctgaggttcagcatgtagtatgaaattatgttttgcattatgtgtctttttttgcaaatagttctggcataaaaagataccttgttatctgtcaccaatttttatctgttagttcctagataggggcctggccaacttcatttctggtgccagatctctttaagaccattttctaaatatgtttttgagcagaaggaatgaggagttcacctcttatggaatgcattgacaaagcaaactagaaaaacagaacttgtagggaccagcttttcttcagtgttatctgttatcccaacaggccagtttaggtcatgttagaacaagtgatttgatctgcacacagtcccattcttaggtgaaatttctgacaatgatgataatctatggcctattgctgccattcatactagaagttagaatctaatcagttaattgagtaaccaagtatttgttaaacattcattgtgtacctagctagtgttaggtcttgggtaagatgcaaagtaaagaaaaatgtctttatgcttaaagaacttaccgtctagctaataaggtaaaatacatgcttgtgaacctgataccgtgtatattaaccacttaattatatgacatatacactaaggactgaggcctacaaagaaggggaagagcatcagtgggttggagaagtccgggaggctttcccaaatagcaaggcaggaagaaatgtgggagttcagtctgccatctcagggacttttagaaatcacccatggtgattaacaagtcatgtgagaggagtgaaaagtcagggggatccaacaaggggaagattgtgatggagagttttatgattcataacttggaaggcatcataaagagctttgcttccacttgaaccaagggcgacccaggaaattcacaaaataaatggtttgctatttaacaggagaaaccattgatggtgcacctttggtaactttaataaagaacagtatttgtcctgagtgttgcatttaagtcttgtggaagtaatgaattgtagtgggaaaaaaaatttaaatttagtaatacttaacattttaaagtatcttaacagtgtttttccatacagaacttttatttccttgttcttaaattgtttctcaaaaattgtagcaaaggtgctctgcaggcatttttaatgctgaattgaaggatttcacattaccaagccccaaatgctgactgataggcagtcatcctacacagtagagaacattttagatcaaaaatgtgtttttttcttccagaagaaaataagaattgggaaatagaataagaaggtaaagataaattatagaaggcttcaaatgaggacaaggaaaaataatgacatagtgtgtttcggttagctttctctgactggaatgggttttccctttccctctgggccttggcccccaccgtctatttctaatcttctagtaaaaacaagctacacatgttacatcagctgctcaggataccttcaccctcacgtccttttactttttccttcctcactcactttgaacattgtgactcttgactgctcatcttgcctcccttccaaccagttatagacattctcttcttcaccatttattcttctctgtctctttatattgtgatcactcttcatcaccagttcatccttccattaagtgtatttactgagggcctactttgtgcccttgcccaacccaacacccctactctcatcacctctcatttgcaagagaagatgtggaggccatcaggtgtgggttctgtccatggagaaacccactccacccacagtcctctcctttgttttatagccaggctctaggaaaaggtggtctgtgtttagtctccatttttccccttcttaacccactgcagcctggccgcttcttccactgcctcactaaactgcaccaacaaataggagtgacctccttattaaaaaagccactgggtgcttttcattccttctcatttctgctttttctctggtgtttgatgctattgcagactcctttcttcttgagttctttcttctgtggcttctctggccgttatttctatctctccttggagggcccccttcctcccgctgcctctcaaacattggtatacctgtttgtcctgccctcaaaccttttctttttcactttgcatgctctctctggggttatcactcacctacacttacctggtcctagatctagaactcatatagaatcacaagttcaactttctattggacagcttcttctgcatgtctcacacacatccaaaagttgagaatttcaattacctctgcacactgaagtttgaacagccttcttttagggcctagtacaatgtctgacatcttgctctacctggctagctgcagtcagggaacttctttaagggaaacatatcagaatcaggactcagggtggcacagaggttcctcccgctgtcagtgactgtgttcatgcatacccagtaacaaaggagcattggtttaaaaaatcactgacttctgaaagcgctccagtaagcttgaaatgatttgctttgcttcttacgttgattatcatcagtttgaggtagcaagtagcaggtgcttgttcctttctttggaggtgaaaagccaaggcccagagagagtagacataatatgcccacattcaaaaagtgactccctaaggagtcagggcaaattcatttattcattcactcaacagatatttattgaaaacaattatgtttcaggcactagaaacagagtggtgaatcagacagatacagtttttggcataatgaggtatcctttttgacgatgcttcttatctcttctttgctcctattttttccatcctgattagtgataaatgataataattagcaaatgtttactataagccaggcaatattttaggactttacacatattaactcatttaatcatgatgacagcactatcaagtcattgtcgttactatcccattccacagagggggggaatgttgggcagtaggaactttctaaatgtgtcctacctagctcatactggtagtgataaggcgtgaatttgaacccaaacaatctgactctagaacccatgctgttagcgactgctttagctattctagctcttaacactgtaatacttgcttttgctcatctgtttatgatgctgtgtctgtgaagtatgacagggtagttctcagcatgccaaaattaacctgcagctttacctaacaaacatttggacttactttgctttcttgagatatttccccccttgggcatttcgttggcagtagtctcattttctaatctgaaatcaggagaaaaggaagaaaaacttgcaataaagcttaagtggttgtgacaggttgctaaataaaactggctcaactgaagttttgagattcttgagaaacactgagaatttcttacaaaggaaattttccttattataataggaaatcatgggtcattgcacagttataagtgtcttagtaaagagagaatgtggcttgaggctaagaagcctaaaatcttaatgagattatttgtgggctgctatttatgcataatttttaaactcttagaaaatatgttttctatctgtctttagtatgtcatcttaagtttccactgctttacgtaattttgaaaatctttagggttgctagaaaaaaaaaacaataatagcaaatgtttacataagaatttaagtttagagtgtactttcacatatagtaacttgattgtttctctttttactctcttataaagaaaacagccactccgtctcaaaaaaaaaaaaaaaaaaaaaagaaaacagccatgaggatatcaattcgtgttgaaacttttttaaattgccaatgttttcttatgcagtaattgtaaactgatttggaaaaaaaggaaatctaaatctgtgaagcgtttacattactgaatagtatgaaaggaaggttttgttacttaagattgcatataataacttcaggaaactgctttaatggataagtaacaatagcatctggttgttagttgatcatctgtactccaaggcctctgaagtgggttcacaccgcccttggtttgccaattttatatcttttatgtacatagtcctactgccctcttttcataattatccaaaggttaccagccaaaacctgtgtggagggtacacggaggatgagatgtgtcccctggggtttttgcattagggaaaattcctgatctgggacatttgtgccctgaccaccagcccccaagagatgccacatttttgtctactttagttgaaaactctcagtcctacagtaggctgtagtaggcctcagtctgaataatcacaaaaccaagaaacattaatgagatttttctgttcagtttctacagtgtccggagcattaacaaaatatatatttgtatgaaatctacaggctactgtgtaaataagcctgctcccttttggttattaaatcatacaggaaagaagcatctgttttagcagaaactgtggaaaaatatatccaggtagcccaggaaaagttgaattgttactgacagatgtgtcaccacagacaagaaaagaatttacaaagcagtggacagacaatattttcagacaataatctgtctttttgggtgatgtgtgggtagcattggtttgtttcttgcctgaatgtttattcatttttttcccaggagaatcccttttgctcagcttctttctggtttggataaaatgaaaagtaaaattgacttaatactaattataacctgcataattctactgaagagaaacttaagaaatagaattattttttctagttaagcttcagggtcatataattattataattcaatcatttattatccccccacccttttttctgtgtgatttaagacatcagaatttaatttgtagccagaatgaaaactggacttaagaaaagcttgactagagagagatttgcattctgctgcgtggttgaacatgtctctaaagtagcagctttagaatgccatgtcctgatagaattccccgttgaaagctagccagcagagcagcttccttgtgtcctcctccttgcctgacccaccgtgaagcgtcacgagggccctagatatgaacctcgggggctccacagcctgacagaagagaactagtgtcgctgggcaatccatgatctggcacagaagccccaggctctagattttgtaattggccacccaccctggcccaaccttggataaatattcctgagttctaagtaggatgaggaatttaaatccctgttttttcctgagttcttccataaccagtccacgacattgttatgagatctgagtggagtgcccatgcttggagagggaataaagggagcacgttctactactactaatgaatacatactcccattaacagtccctttttccctaggaatgatgccactggaagggccagatgtgactccactgtagtcactgacccagaccagctttacccctagggtaattgaaacctatattaaatgatttgacaggtcataagcagtgccctctacccacttaattttctcagatgcctcctccattatgagctaaaccttgtagattttcattcttttagtatatggttttgatcccttctaaaatggacatctcaatgaaacataaattacttaaaagttattagtagtcatttatgccatagtatgaattagtttacgtttctttggttttgacaggaagataaatagaatacgttggggagaaaatgtagaactcgaaacaaagggagaaagcaagttgccacctttggaagactgcagtgatttctttcccattagaatttgctctcatgttttcagtgaagcatggcatcgtgttttccattcacctctcctttctggcagggaaagacttggagttctttttacagctttaactctttcttaccccttctagatgtagttccatttcctttctaagatgaaagcttgtctttgtgccctcccagaatagttccaagcagcagaacacagtgaatccttccagataaaagaccctgctgataaagtgccagattgttatcagagaagcagtgaggggagtcaagtccctaccattaattacctagttacagttttgtttatatcctgttcatttggggcatgtttttcttggacagtttctagtctgtgttctgaactgaagtctgaagtttgtaaaaatcccaaaggtcaaggaatagtgggttccttattttctgaaaggtttaatggcaaggaagagaagatcaaagtttctatctttcatctggaaggaaatagacaaatgcttcattttggtggttcattcctcacctcaagcatacaaaccatagtatgttggatgaactctgacttcgaatacctagccaagaggttacctggaaatagaatgacatgtatctctgtgaagacgtgagtatcaaccaatgaatgactagatatccacgcatcaaggccagagtccagttgaatctaaaataaagcttcttggtaaatgtacttgatgccactgaactgtacacttaaaaatggttaaaatggtaaattttaggttatgtgtgttttaccacaacaaaagtaaatattacttcctgacagctccagtgcttcagtcacagttgcaaatacagttggacctcatccaatcatttatggattcaaccaactgtagatcaaaaacatttggagaaaaagtaaacacaacaataaaacacaatgcaaatgtaaaaacaatacaacataacaacttacataacatttacattgtattaaatattataagtattctagagattatttaaggtgtaccagaggatatgcataggttatatgcaaatactgtgcatactttacataagggacgtgagcatctcacgggtcctagaaccaatcctttgaggattctgagggccaactgtacaatatgggtgggctgcatggcctgcattattttgaatgggattgctgttgcatataaagcattatgtatccatttaagaactgtgggactgtgagtaccgaataccttaatgaacagaagaagatgaagagaccattttgtcaccatcatacaaacatactaggaagtttgggattggaaaagagccctttctgtcttgaaaatgattgactctgaaccatgatagccactctctttctacaaatgaaccaaaagaagtggcaatgggtcacttgatggctgaaatagtagtgcctaaggctttgattatcaaatagtgatattgatatgttccacaactagaaatgtagtattaggtaaggcaacctcatctgtggtatctggcagccattaagtagccaagcatatatttcttgaccgtattaaatttgtatctcaccttatgctgctgtattaggttctgtccaaaacccaacccatctttgctaatcagactgctgacttacgattcagccagccctcttagcctcactggtgatggggcgggggtggtggtggggttttaggactagactgttgtgtttttctcatcaagccaagaaacttctcagaccctgcaaacatgttacctggtaacatagctacagtatgaattttaggatagaaagaaggaagggagggaggaaagggaaaataaagaaaatagccctatgacatagctacagtatgaatttttaggatagaaaggagagaagaggggagagagggaaataaagaaaataaccctatttcaaatcatgaagctttttttatcgttaaccccaaatgcccttaactcagaactctgaccaaaagatgtctcttttttccctgtgtgtattgaactcatgcactcatgcctatcatcatttgaaggtagttatgagacattcattatgacttcaataacttgcacatatttaaatttagtgttttctttagaaaaggctagaagatgtagggatttaggaagaagttaaggtaaacttaaaatatataaaagctcactttgagtgaaaacaagtaaaaacaagccctgaccttctcagaggtaagaaaagttgaaattaaatgtattctttaggaaataaagactttgccaagaatagcatggttagttaaagcagtctggtgtggaaggtgtgtcttttaaaaaataagatttctttactttcttcttgactaatggttttgtcagaagaaccatttgaataataaatgaaatgctttgaagtatataggggagtggagaacttttctgtgacttgtatgaactggtgatacagattataaactaagtgatgccaaattccaccagtttacccaggctctgaacactagcaaatgtagtcaaagccatagaaatctgctgatgaaatcatgaaaatgaacagaagtgatccagattgtttaatttcttttgaaatattatatttattagattttagcacccaaaagttaaacagtattgaatttcacacatagcactttatttttaatcttgggttgaagattatgcacttggcatgactgaagagtgactcatacattttgcaccgactttattattagtagtattattttgataggcaaggaagaaagccggggagtaagatgatactgaattgaggctaaatttgttaattgattgaactcaaacggaaataaagaatgtcacttaattttcttctttttatattcatgtgtgtatcccctgtgaagactttgaatgctactcatgtttaaaatccaacataaaatatcatctgatcatcaaaattggcagtgggaattagcagtattttcttctaattaatgtctcaaactgtgccacagctaaaatctcatcacctggacactttgaaagatgtgaccagtattctttactgacatgtttcccatcttaaaacacaatcaccatgaaattaatataccaagtcttggtcacaatccagggaaagacttgaaggcaatgtgattcttctcataattagcagcctaattaaatgctagagggcttcagctgtataataatgtaccgtgcttctgaacaaagataccaccaccattgaaactgtatacttgtaacactagtatatttttaattagtggcagggtataggtgtatgtaatcagttttgtttcatcttctaactttgcacagcagtctccattgtgcattcatttggaatatattgaaaaataatccactgatttggcttctgtttgtcagaatttagggtgactaaaactagtatgagttgacaattaccttttcatgatggaataagcaaattaaaaggctgttcaaaatattagaaagcaggtttaatctaatcaagttggggggaggggaatcttttaccttaataaccactacgaaatcataccgctgaatacagcaggtgagtttattaaagctggcccaacaaatttgacatcacttggttgaataattggagctgtcaagtgtccttaaaatgaataaaattgaatttcttttaatatgtgctattgttgttcacttctatggtggtaaaaatatcagagatggggaacactcatttttgcaactagcacaggctctgcagtgagacagacttgactttgaatcctagctcatacattcattccctttgtgagcctgggcaagtcagttaacttctctgagcctgtctagaacatgtgaaagattcagaacattgtccaaaaaaatttttttgttttttaattcttgtgtgattgttaggatttaagtgtttattgatttgattttttaaaagagcacaagggaacattaattctggttgtaaaagtttaaaggaaatagctgggcttgtttaatctgaggaagagaagacttgagatgttttggagatggagctggaggctaagaaagcaagacagaatgtataacaacttttctaatgtatatgaaagattattcttttaaaaacaactttattggggtacaattgatgtaaaataaactgcacatgtttaaagtgtacaatttgatatttttatatacccataaaaccatcatcactgtcatggtaaggaacatagccatcatcctttgtaatccttacccaacctcccctcccccacctccctggcaatgattgttttatgttctgtcaatacagattaatttgcatttcctagaattttaagtaaacggactcatacaggatgcattctattttgtctggctttttcactcagtataattattttgagattcagccatgttgttaggtatatccgtagcttgtttctttttattgccaaatggtattcgattgtatggatatactgcaatttgtttgtgtacttagctgttgaacgacatttatgttgtatccatcaactagtaacaaataacttgctaggaacaatcatgcacgagtctccttttggacttaggctttcatttctctagtgtaaatacacaggaattgaacaggtgagctgcgtggtgagtatatatttaacttgttaagaaactgccaaattgtcttccagagtgattatacattcccactagtagagtatgagaattctaattgttccatatcctagccaacacttggtatgctcagtctttttaactttagcctttctagtgagtatatagtagtatttcactggggttttaatttaaactttactaacgtctaaggatgttgggcatctttacatgtatttggcattcatatatcttctttgctgaagtgtctgtttgaagctttgacccaatttttctgttaggttgtttgctttcttttcttctctctcttattttttttttttttttaagagatgagatcttgatctgacaccctagctggagtgcagtggcacagtcacagctcactgtagcctcaacctcctaggctcaagcaatcctcctacctcagcctcctgagtagctaggactacaagcacatgccaccatgcctggctattttttttattttttgtagagacagggtctcattttgcccaggctggtctcgaactcctggccccaagcaatcctgctgcctcagtctaccaaagtgctgggattacaagtgtaagccatcatgcctgcttttgttttcctattattctgaatatattttggatacaagtcttttagacatagatttatttctttccctggcatgtagaaccagaaaaacaaaattaaattgcagcaagaaaaagtataattatactgtataaggaagtattttttttgactggcagtataaacatgggtactgggataaccaaaggaggatgtcagactttctcaggggtatttaaaaactgactggcagtagtctatttgggatactgtaggcatgctgaaatatgactcaacttacctaattgcaattttcatttgagaaaagataccttgaatgagtctgttgctaatatctcaatatctgttgctcttttgtgtcatttttccaggccaaaaaaaaaaagcaattttttggaatttttcaaaactttccttgtactttattatttttaaaaattcattctttctggttttagcttgaagtgtttctgtgaaacatgaggagggtcattcaggggcattaattagcttcagcaaaaacaaaatgcagtctctgcaaagtaatcaaattaaaagaaatactcaaatttctttcatacagcagtagcaccaatcattgttttagctgatggcactgggaagattcatttaaccctctgtagatgcaaaataattaatgagattctagagaagaggttctacatgatgaaaggagttggagtggttgtagccctcagaagagtaaagggtgctttcatgatgggattccagtagagttaatgaagggttttcctctgtgtagaaaacactggtcatttgttctccaactccacagaggctcaaactagagaagattggctccaactatagaaagattgagtatggttagtgttagacataaaacttttattattagcatcaatattatgagattaaacaatggaacaagagaggtcataatgatattttaaaataaaaaagatagctatctgcctggaatgtttaaatgtccatgattgaattttgtttttgaaggggactttggagatcatttactctaataagcttttatagatgaggatgtgaaaggacattatgtaacttgctgtggccacattgttagatactcatattttaatttgaggatgtcttaaaagtagccttgcgtaagagactcgaaggaaaccatgtaagtgcttctgcttcacagtaggtttcacttcaccaaaaaagtcacttaaagctgatgactgtgtatttcttctacacccaagaaaattctgccaatgtgctgacatgtatgtgtcttttcttgtcattagtaatgttgaagatttttattcttgggcagttcaaacttgtctttaaataaatactatactttgctcagaggcaacctaatcttctcagtatcgttccaattttagtatatgtgctgccgaggcaagcacaaaatcaatactatactttgaatgactgtaagtgatttgacctgaggtgatcagtactgagagaggataccaggggacactgccacagcatttgtggaacctgtcgcagtctgctgtggggttcttcataaactgttggttgatggctgcaacttggtggatgacttgcttcaaagtcctggtgactaatttgccttccttaaagataatattgaataaagctttaggctttgttttgtttaacactagttagagcagtaggaaacatatttagactaccaattccttatgtatgagacctgcaaatatgcattccagccattgaaattagtgggataaattgcctacaaaggtttcctcattcattatcacaacaaaaaaattggcacaggacattttatttggttgtggttacattttatttgggaatccatcattctttttatgttcccatagactatctagagtgaaaacccacatatatttatataatattatatactttattttaaagggtttatctaagtactaaaaatgagagaaaatattttaaagtacctggcatctagcaggcactcagtaaatattcctaccttcacttccttttttccttccttctttttagcgtggatatcagaatcttttataaatgtaacagattattgtcaaaaagggaagttaatagaattggtgtatgttgagcattcccttgactcacaggatgtttagattgtctaagattttaatatcatttcagagataatcacctgaaaaattaaactggtcaaagaaaaatttactcagcacctatgatttgtgcagtcaaccttggactagaattagagtactttgaataccagaataagaatatgtatttaatgtgacaatagagagctatcataggttctagaaaatttgaaagctaaaaaaaagttttttaatgtcaataaaagcattcctttctaaaccttctatctatatatagtagggttatatataatagggtttaaaaaataagatggtaaattctctctattcctttgtgtagtgtcttaaaatgactacccattcctgtgtttgtgaactgaaaaatcaatcactgtaaatatggaatctcttgctctaaaggataatggtgtgagtttcaactgtattaaatcactttgagaacttggcctttgagcagtcaacaccaaaggaaagccagcctgttactgatttctcagacccatccactgcctgcaaggaaaggcgacatgctgaggggccaagtgttattatgttcagccccctttaaagagtcagtggctgcctgaacgtgctcatttcttggttgtttgtgtagcccgagcagaaacattgtgaagggttttgcgattgggaggaatgtgcaactctttcattcattctgcatatgctgcagcccagctcctgccttacatgcagctcatcccagcccaagaaccccgagggtagatccggaatgcttttccagctgttgcatgaggagaacagtagaccagagtgtggctcattggtacagggtcagagagaaacccctcagataggctgggagggaagattatgccaaaatttcaaactaagtgtagtggttatttttacttgcttaggaaagatgattcccttttattttctagggctcccaatgtctttgtatgtactttgctataaagtcttttccatatttttcccagagtcaggaaagaattattgctaaggtatagcacatttcagtgcccctgaggagaatcttcttctcagctgtctaaaacatttggttggaatctgaaaaattcagtttcaaattgtatttgttgttgtctcaaaaaatgatgaaacatttaaatgaaatttcaaatgaaatgtaattttcatgcttcatctctacattttgatcagcaagtgaccagaaattagcgttcagaaattatgcatcttttcatttatttaagaatatttctaattctgaacaattaaagcatattgtttagagagcttttaaagtaacaactgcattgtgtaccttcacccctccctgttggaaaatctccttgccttatttcctggcactgaaagggatggtatgaatcaagtagccatagccattgcacctgggactgtgtttctgccacgtcaggttgctgagtgctgtgcctatttcttgcaggggcaagtggagggatgtccagatgatggaggctgatttctagctcccagcagctgacatttcacagcctggaattaatagcctgtggcctgtcagcctgggtcactgggaggcaatgtgaaggtgacctcaaaagcatgcttttctgaggcttagactctgtggttgggcttgtctcaaggggtcacacactacagttttcagatgttctgttgtggcttattgttggcctttcttcataattttttttaagggtttaatgtgttgcttagaattaatttgcaaagagctttgagctgcccgataggtaacgtatgtaaacattctacctgaagttactttgtgtgtctggaaatgtgcagtttttagcttagctactgtctacagctcttattttctccttactacccaaaccaaggatttttaaaaaatcaaactttaaaagctccgaactcattactcttccaagaaatatatttgaataaagaaatccctgagctatgcagagggcaagattacagtcaatgcaatttttatgtgctagtggtttgaattgcaggaaaaggagcaactagttcgggtggtggtggtagatcctttgatgaatggaatattggcataggaagaacaagtagagaatctggcaaccttggccatcactgaactcacctgagaatgtggaaaagggcttcaggaatgccacatttataacaaaaacatatttaatacttacaggtcgtgcagaaatatctgctttttccaactcactggatacaaacttggtgtgtgtgtgtggtttctctcttttatgcatgcacacgtacccacacatatatgttttcctgaaggcaagatttgaaactacgaaccacacagaattaaaaaggaaaaagaaatcttagtataatagcggtagagtcgacagaaaatagacttgggccctggacctggagaataaagccaatgggcttcacataaacaagtgaataggccccagagaaactcaagcctcctctcctttccagctcatttagaggggaaggaggagggtaggcctctgtgagcacttggagcctgtttggtacaggccaggctctgtttcctcagccagttgttgagacaaagaacactagagaaaaacaatttgtaaatgtgtataaaggttttattttcaaattattccacctgcctgtcttctaggcattttattttcatgcattatttcatttaaacttcacaacagccctatgaaatgagcactcttccttttccccatttatagaaggtacaaacctaggtttactgacttatctaaagtcacacactagtaagtgtcagaactcagatgtaaacttaggtctgctggattccagagcatgttcttaagtccctgtcctatgcgctctgtgataaagaactatgaagaccctgtttctgttctcaatgtcatttcagtctagcagacatgatgatgcctgagagctactgtggggaaggtaagtgagatgcactggctgctatgggagagctaaatatgcaattggagtaggcagagggaaggaagtgattgattctgatcacagaaggtacagtaaagtttcacaaaaaaggtagtaccttagcagaggccaggcatggtggctcatgcttataatcccagcactctgggatgccagagtgggaggagcacttcaggccaggtgtatgagaccctgtctctactttaaaaaaaaaaaaaaaaaagaaaagaaaaagaaaattagctaggcctggtggcacccaaccgtaatcccagctattcaggaggctgaggtgggaggatcactggagcccaggaattcaaggctgcagtgagctatgatcaaaccactgaactccagcctgagtgacagagcgagaccctgtctctaaacaaaaatgtaataccttagcatagttcagaagatgaagaggagttcccctcttcattacaagagtacaggagtaaaagtacaagagtaaaaggacattactctagtgagaatgaactgaaatgtgcaaaggcactagttggcttgccaaaacatacatagaaaaaagattttttgaaggtagtataatccagagcttcagcctgctgtgtgtcacccagcctttagagatggcctattaaatagggttgtctcaactttgggttgtcagtagatgaccatttcccaggagctgacagctgtgctgtaggacaaacagaccataatggcatggctggcattcttgagtaactttagtgagaggttttagggggtgtgttgggggtgtggggtcagggtcagacatagcttttttgaactcataccagctctgaagatgcaaaccgcttggttaagtaggggcatctagagcaagtggatggtccttttcatcattgacagaagtttggggcctctgttttgcatatggtatagcctcacctgaaaaataagaatcagggctggaggtgggccaggaaatggggaggaactgggggaatgttaattatgttaatgaggtaggatggaaggggatattggctggatcctgaagccatttggagactttgaagcctctggttcctgtgacatgcagggactcgcccagtgctactgagccttaaagttccctcagttcaaaaatacctccccaacattgcctacaaagtttctttcagccactctggcttgtcagatttaaatgaggtaccacatatagagcctggtctttaataagtgttcaggagatgttagctattatcagcatcatcttcgttgttctgcttcacggtctacaaattagagactgattggttctctaagttgttcatacctcagtgtgattaggttgaatgtttggaaacattcggcttttccaaggctctggggattttgaggcaactgcgttgtaaagtcttagaaagactgaattttgtaggtagacagaccctaattaaaatgcaggctttatgctagttttatgacccaaagtatgctgggacacctcactctgttcatcttaaaataaggttaatgacactgaccttggaatgaagattaatgaaataattaaaatagtgtatcaaaagcacatagccagtcctggcacatactagtgacttaatctcagtttccttccttttgtctgggtgccctgaggggcagtttgggttcacacagggaaaggcacaggcctgggaaaggacttctttcttgccaaacccaagcgctctctgcctctccgccgcctctccccacttaggcagagctgggcatgatcacctagactagtactcccacacacaggagtcacacttacacagcagcagcagcttgtgtttacttctcatggcctgagaatcattggctggttcttctgtcttccacactagactgtaggttgcttgtggcctaggcagtgattttctctccagttctctggtacctgaccaagtgtgtgctgtgctaggtactcagtagatgtccctacggatgtgtgtgggcagagacagttttggtgatgtatagccacttacctttgaaacctttcagaaaaaaagaacagattgtgagagtagatatgagaggagaacacttagaaaaagcttagcccccactctgttaaaggtggtaaagttagcatgatctcagcagaatggtcctttttttgctgagaatagtgcattctgaactcttcttggttcctcaagtgttaagtccaagtgtgtatttcaccctcatttgaagatccttcatctgttgcagaaaattgtctcagctctgcctcccacttcacttttctgtgccactcttcggctgtgaatgtctgcatgggtaccaccgatttgtgatgagcaggctgtatatcgcctctaagctggtggttccctgtgagcagtgttcttcactgctgtgtcacatgcagcagaacacaaacctgacagccacatcgtgtggtcattgatgtatgcaaaggagcagcaggaggttctccacctgggtctgggaaactccccccacaagggttttggatgtgtgtcacgaacctgaaactgtgtgggaaattgtgtgcatatgttcataaatatattcctcttgtgagagagtccatagtttacattagtttctgaaatattttcatgatccttaaaattttttttaaaaaaaaaaacaacaaaaaaccactcatttagaaattttccaaatatgtgtaaattacagtttgtgtttttgttagctaggagatatttttatgctcccttgatttccaggtgtgagctacaggttgggtagccagagagctctggatcacagtctgccgtgagcattgcttacacttagccctcagagttttcactgaatccttctgagcttcattttatttttcttctgttaatttaggtttataatgcccttttgtctacaggaatgttgcatagtaaagagatcacaggtgtgcaggtgttttatcaactgtcaagtgctgtacaattgtgtgatgcaagtattcctattaaaaatgtatcatgtctcagctgggcatggtggctcacgcctataatcccaacactttgggaggctgaggcgagtggatcacgaggtcaggagatcgagaccatcctggctaacacggtgaaaggccgtctctactacaaataaaaaaaattagctgggcgtggtggcaggcgcctgtaatcccagctactcgggaggctgaggcaggagaatggcgtgaacctgagaggcagagcttgcagtgagccgagatcacaccactgcactccagcctgggtgacagagcgagactctgtctcaaaaaaagaaaaagtgtcatgtctcatgtcacacagtattgaggacatggtaggcagtcaataaataagtgattaaaatgaacatggaaagggtttattgaagtgagagggctagaggttttaagacactggtgtctgtgtaccttgcagattctgtggagaacctagtattcaggcctagaacatagcttagggctattagaggaactgattttcaaggaatgttaaaagtagaaatgaccttcgagaccttaagtgtatttgttttattttatggaagacactgagacttagagagacagaggctatccgatttatttcagaagggcttgagactcttcctcatcacttttaatagtggccaaaaaaagaccctctttgccttcatattatcaacatgttgtcttacctttttaaaacagcacagaattcaccacatggtcttaattctctttttggggctactcacaggcctgtaattctggagtatactgatgctattactggacactggcacagtgcactgtaaaaacttggaatttctggagcccttccttcttggagtgttctcttagacatcatgtcagaccactaggtggaaagcattgccaccattcttaactgtactgagactcagagaggttactgtgacttgtccaagtcacagaactcagtgtccaaagcagaatgaaaattcaggtgttctaattttctattctcttaaccgttagattctaaatgttctcatcagaccccctccctgccgccagtaggcgacaaaacagtaacctagaaattttttttcttagtgtatatatttatatatatatatatatataaatttgtctatgatctaatctttccacctaaagaatttgcgatagaatatttaaccattgctttataatgaatgttacttaattaaatattacttcaagaattggcttcttttttggtaattgcattacttttttgaggagaggttttgttttgctttttaacctggttgtgtgcatttggaaaccaccctaacacagggtatccaaaagcagaaaatactggcacttttccccctttccatccttcctcttgtatggatgccagaatcctttgggaaatcatcatttacaaaagtcaggagcaaaaggaggggcattctttagtgtacagtcactgctaattggaaactaaacatctgtaaccatgtcagagttatttgtatttgaaaagaaacatttatatacaagagccctttcggtaacataaaacacagtgtaacacaaagtgtgtgtgttggagaggtcggggacagacagaaggggaagcttccaacaaatgactgccttactaagtgaggtcatttgctaattaaatttcaaaacattttcagagttgttttttgtttttttgtttttttgttttttggtcaaatgaagtttctccccgacccccacccttaccatttcctataggccaaagcaaacatttttctgcatttgccaattacagattaaacatttaatcacttaaaaagaataagtgagaaaatggatgagttttgggaactgtccaggatgagttgtgggaactgtccagctacctactgtaaccatagctctctgctttcccacagataatgtgaggtgacctcttctccatcctgaaactatgtgctgctggacctacccaatagacgtaactgtcttgggggaaaaagacacattttttttaaacaccccatacttctttttcctcttcccctgcctcccccaacaccatgatgaaattctgctcaggctattctatttgtacagaaattgtatctgtatttctgttggcatattagaataaatgttggtgataacctctagggtgttagaaacattgctattgtagggccctgtccctctacttactgagccaacatggccatgtagccctaatggcctaattcttaccaagtaattcctttgtaaacacagattagttttgaaaacagtcaagaggccatctcttttcccctacagagtctaccgtcttctgaccttccctattcttgtgatctaagatatttctgtaagttgagttacctttttaattggatgaaaaatcatgaagtcttgagcgttctagtaaagaacttagttaagctggtacttagcatattggactttcctctcaatcaatctcctatctgtgaaggctttaaagtgcacagtttcagcaaaatggttatggcctttaagtttctgattgtttgtgaagttgagaggcctttagatgacctgcctttacaatgacctttctagaatctcaaaataacttgtccaggactttcactatttaagaactggcttttattcccgctctttgggtatgagtcagcccagagtcaaggatttggtgatttgaaggtccatctcttgttctcttaacagtaagttcagaccatgtactatgctattcgtagcactccccagtatggcctgacccacttctcagccttaacttctactgttattcatgaacctctgcgttattcaaacacatctacctagaccttgagtatttttagccttgctttataccactttgcccctggttgaaatggcttcagatctttcttggcctacttgaatcatgcttgctttcctgagttccatccttcttctgagtttctatagtcataatgtcaaggtcacttgcttctcacttttcctatactgtctcgtacttttggtcattttttcaaatgtacttttcctctggccaaccaaagtatgggctcttcaaagacaatggtgactgtcttattttttatggcacttatcatggtgcttttgcttatcataaatacccaataaatagttaacaagtaagttgttttttgctactacctgtttattgtcttattcccaagcctgtctacatttaatctccatgataaagaattatagatgctagcaatgtttttaaccaaagcaaagtcacctgtagaactagtgcagatacaaaacatcatttgggataaggagcagctcctgtctccccctaacccctggatgttccaggccatgctagatagaatgtaagtatatacaaagtcacagatgtggagatgactattgaatggtcttgtgtttttatttctccccaggtgtggtcactcacctgtctaccactcccgtgaaatggcagctcgtgccttggtcccatttgttatgatagatcacattcctaataccattcgaactctgttgtccacactccccagctgcactgaccagtgtttccggcaaaaccacattcatgggacacttctccaggtaagtaaagttgctttgtgtgacttctgtcaaacaccataagatgaactttggtttcttatgtactgttagctggtgaagatttgatacacagcctcttaactttatctgtagaacttttttttttctacttccgaaagatcaggtatctcctagttatacttttttcatcccaaatatcactacagtgttacattgtgattctcttatattatcttttgcaatacatcctgtgttttctgcagtatactttctcccacttggcctcacctctctgaaccagataaaactttgtcttttccatcaagtatgcctgcaaaacattctgggctactacctattccgagtgaaactgaaagcattccttgagagaggttagcctgagaggcacaggaagagctgtacacatcagggagagtttgccctgtggcacagcaccttagtacgtggaagtattgaacctttcctgttttctctgtgctaccaaaaaaaacttattactttgaataaatgtacaagtttattgtttttaacctaacatttcttctagaaaagaataacatacaaaaaataaatgagaaagagactttttactgaaactgccctatttcaaccctaacttgaggacaggtagtattggtgaggtctcctgttcaaatggctgctatagtgctcatataggcatgcggttaggggtggaaaataaatgtcaggtcatgttcctggtttatgaacagagttgagagatggccttgagatctcaatacatgttataagcctgagatcgacactgctgacatggcaggcagtgtgtggagtgattaacaaggtgaaactctggagccagactgcctgggtgtgaatctcagatctaccccgcattacttatacatccatgtcttcatttttgaaataaggataatagtagcatatacctcatagggactttgtgaaccctaaggaaattaatacatacaacatgcttagaatagtgccgggtacaccacaagatatatagacagtcattattgttattattatcattaattttaataaacctatactataatgaaaactaattatttcataactaattccccctaggtaataagaatgcaagatagaactatctttttcttttttctttcttctttttttttgagacagggtcttacactgtttcccaggcaggagtgcagtggtgcagtctcggctcactgcaaactccgcctcctgcgttcaagccattctcgtgcctcagcctcccgagaagctgggattacaagcagcctgcacccccctgtccccacagtcactaatttttgtatttttagtagagatggggtttcatcatgttggccaagctggtctcgaactcctgacctcaagtgatccgcccacctcagcctcccaaagtgctgggattatggacatgagtcactgtgcctggccgttccttggttgttttctatattcaacaaatgcctactacatttcactgtgtcacagtcgcaatagcagctaagtcagtttttgccttgaaggagccaaggacaaaaaaggaccagaaaataggcagtcatgatgtagtgtgctaagtgctggctgaacacatagcagggccaccagacttgtctaggaaatcggggaaaatgtcccagaggaagtgacctctaagcagagactgaagaagttagccaagtaaagaaagggaaggagtctcccatgcaaagagagcaacataaaggctcccagtgggtagcccccaagtgggaactgctggtttgggtgggactgaagttctaggttggcagttttcaaatttgtctcaggacctctttacactcttaaaaggggttgcggctcccagagagttttgtctatcaatattcagttagaaagtaaacttgagacaggctggtgtgggggctcatgcctataatcccagcactttgggaggctgagctggacagatcacttgaggccaggagttcaagaccagcctggccaacatggcgaaactccatctccactaaaattacataaattaactgtgtgtggtggtgcacgcctgtagtcccagctactcaacttggaaggctgaggcacgagaattgcttgaaccccagaggcagaggttgcagtgagccaagatcatgccactgccctccagcctgggcagcagagtgagactctgtctcaaaaaagaaaaaagtaaacttgagaaaatattaaaacacgaggacttccaagcacatattgcattagttatcaatataatgatatcatcacacaccttgtagcctctggcaaactccactgtacactcatgagagaatgagagtaaaagaggaaactattttcttggcatcacttgaaaataatttgtcttgtggacctcttgaaaagattgcacagccccagactgcagtttcagataatctagtctgtgttacatacattatgggtcttaggtggtttctttaatataaactcttgagcactcatctcccttgagtttccactacatccctgtgattaggagagggacaggggttattgtcttggtcttaaagatggaccattgtggctcaaaaattatcatttgctctgcctcaaaatttacatctcttgattgtgtcagactctgctgcttcttcaaaagagcagggctggaatgatgaggaatatagaacagccttttcaaagtgtgaactgtatctgagttagaaggaaggcctagcttgtcaaggggatcagccatcagattttctttactgaagatccactcttggctgaactttatccaagtagtttggttggagttgcttcttgggctctctcaccagttgtgcaaatgagcctcccagccttgtttcccacacgtgctactggcaggtctggctgggtttcaccagtctgcccagcaacaaaacatggtcttttgctctgtgtctgggctacttttgatagtctcaagtttacttcttctgctagataaaatgtgaaatcctgtggaaaggttaaaaccctagaaccctggggttgttgtggctgttgctcttgttcctaagtgttggtgggatgaagggcttgttgaataaaagccagcaaatgtggttgttgggtatcatattcatgtttgtcagacagattcctacctttatcaaggttggtttaccctggttgagaaaaagaagtcaaagggatgtggaaagtctttctggcatgtccatttgggtgtcacacctgtgttgtcctagttctgtccatcctgtggttctttatggggaaagcataaagggttaagttgggaagggctctttctttttcctttctacagcttatagattcctctccacataaagctacctttgaaatcattaaaaagcctgcacctggaaaagaggtgttagggattgaaaggaatggtcatctccatgggacctccagagccagctaaataaatataaagttgttatttttttcaaaagcaggaaatcatttcataatcagaaaacaaattctttcacagaacattttcttgaattatacattttgactgctttgaaaatgtttacataaatatatcaaatctcagagtatttctatagtataccttgaaaacaagaaatatgctgatctctgaattttctgggactatggaagaaagactcaaattatagcacatgcaaaaaagaacatgtgggattcatttcttaatcgttttaaaaaccagaggttcataattgctgtgttgagatggttataagtaacacacattagaaaaggtgaggttatgcggcagattcatgagagccaggggtaaatgacattaaatctcaataaaggctagataagagccatggacattacctcatttgggaacatcactagcagggctgctctgtcttttaagtagatttaaccttctgtttttgttgccagaactcttcatgttggggacttaacattattactaggttacttatcactctcaagaaatcatattggagttcagaaaatcttatattgaggaggagcttggccaccaatcatgaggaagggtttattctgattcttgggtacttaactcacattttgggtgattcataagaaaatgtataccatttgaaataagagtttgaattttcagttttttcatttcttgtctattttgggtcttttgttgttgttgttgttgttatgtacaaataaaaggtgatctgttgctcttaatttagctcttttttttttttttttaagacggagtctcgctctgttgcctaggctggaatgcagtggcaccatcttggctcactgcaacctctgccttctgggtttaagcaattctcctgccttagcctcccgagtagcttggattacaggcgcctgccaccacggctggccaatttttgtatttttagtagagactgggtttcaccatgttggccagactggtcttgaactcctgacttcaagtgatccccccaacctcggcctcccaaagtgttgggattacgggcgtgagccaccgcacccggctgagataacatattaaactctaaagcctgtgttcctattttctttagaatgtgctgcctctgatgtgaataacagctttttatggctaaggaaaataaaccaaggatccatctaaagatatactttatcactcagttgctctccttaaatctaattgggtatgttatgatacagtggaaacaaagtaaatctatttgtgttattgagacagaagaagtcagtgaaacccagggaagctgcgacccgtgaaaggtatattgtaccctcccctctctactcatctctctgtcatcatttctctttggtcttccatttaatgctactaaatctgtatctggaaatacagatcctcccttgggacctaggctatagccaagtccatagttgccccaccttctgtcatccttaagggtttgacaaaacctctcaaacttgggtaaccataggagttatggatcctagatctaggaactgataggaccatgagaaggtggtcaagactgaatttaattcagcagacactgtagcttgcttaccctgtcctaggcactggtgaaaacacaaggagtttgcctttgatgcaaacttaaagagagctgtggattagaagccaagtgagccctcggggaccagggatcatatgagtaacagaaatgaagaggagacagaagatacaatgccagacagggcatcaggcataaaaggagactgaaactgaggccatttctgcttgagtctggagcaccccaatagattctgtgtttactgtagagccagaatctttacgtgatgggaacagtagtgttgggctggatgggacacatgaagaccgaaactggagtagactttagcattacctttacgggaagaaaaccagaaaacaaagaaagaagtaaaggtaggctagttcggccagctagttgtatgaaggaatcactgtgcaagaagcagggatggaaccaaccatccttcactctattctacagacaggagcagtggaagcaagtagaaaatcagtgatagaggtaaccttaagtgtcaactctactggagtttcttaaataaggaagcaaatgaacatttatagaaaagatatgtatatatatttctgttaatattactgttacatcaaaacttgtgattaaatataaaagaattatttccatcttttaaaaatgtaaccatatgagtcaatgtcttagtgctttaagaattttaatgtcatttatatttcttaaaactacaaaattgtgaaacataaaacggtccagctgtccagaaatggaacatttcttgatagattccatttggcgacctaagatgttggccgtctccattgttgtttgttttatgcctcgaaaatattatttcagaatggaaaatcaaaaacaaaagcatgaaactatgctgatgctgtaagttataaatggatttctggtctgtgtgctttttttctggaatgagtcataatttaaagaaaatgctcactcttgtcaggtggccagatttattctttctttttgaagacttgtgttagtgtgaaaggagaaaaatcttaagttgctagaaaggtccctagtccaagaagggttaaggcagagtttctccagtggcgtggctatggatgtgccaaggtatttattgattccttcagctctcagggagtcttgagtgtggcctggcagggctggagcctctaggcagtcacctgcagctgggagcagcatcgttggttttatcccagagtgccaaagaaagattactttctatgtgtgccttgatgtgaaaaggattgggaagcattgggctcttaaaaaaaaaactaaagaaaggactaaaccttgttaaatcttaccttttggcaatatattcctttctggatataagcccaaaaaagtcatttttaattaaaatgctacttttgaagatgaattaatcccttccttataaacatccaaaagcttttatttggtgtctgttacttagggagcttttgctgggtgttggagacagcttttagctgccaggttctggagcattgactgtactgcactgtgtggttgttccccaagcaatgtactgctgttttgaagtgctcagaactcagagtatcagtcaggggcaagtgaaacttagagatttgccatttgatgtgtcctcaggtgtttgtaactgttcaggatcagagtaggggaattaatagcaaaaagaggaaaaatatatatttttttcagtgagagatagagtgtgtgtgtatgtgatgtatgtgtgtgagtgtgatgtaccagtcactgagttcctacagagcctcttctggaggataggtgttattcccatcctactggtgagaaaactgaaaacaagaggggttgtgcgatttcactaaagttatgcaagattaaatggtaaaaagcaaaactgagattcaagcccaggatcgtttgaagcttttgagcttgtgcagttagccactgtagtatactgcttctctggatgaggaaaaggaatattgtcaggggagaaggattctatctggggccttcgggttgtgggtaaaatgggatttgatgtcatctatttattcattcgacaactgctaattgaacaccagctacgtgccaggcactgttctgggtgcttggactatatcagagaacagaagagacacatccttgccctccaagattactgctctcagtgtacttatattccagcagcagggagacagtaagaaatgttcaagaaataaacattcaataaaacatatcagaacttattatagtaaatataataggtaaattagatagtttgttagaaggtaatcgttgctgcggacaaaggaacaagtagagtaggctaaggggaatcaggaatagataggagaggagggcagttggcatgtcagaatagtcgtcattggaaacgtttgagcaaaattctatcacaagacatgggaaaactttcttattttttgaataaaggtaaagggtagacatattttcttctgaaactgtgctggctgcagacatttgtaagcaggtataccaactgcatgtttgagactatctttacccataggaaagtgccaacagagtgggcagtagtggataaacaaggccaggaaggatgccattactttagaaacttaagagctccctaaagcgaggtggtcatactatagatgccaggactgctggggactctgaaacccttttcttctggaatcaccgtgaataccgtcagtctgtcatggttctgatgagcttaggcaaagagcaaagtatccatcatattacttcctctgctttctggtatgacctttaccttaaccctctggacctgggccttagagatgtagagtaaatgtggagaatgtttattcttctgcttagcaaatatttattgagaagttaagtacatactatgtcaggtactgtggaggatacaaagaaaatttatagcatattctctgctctcaagaagcttatgagctacctggaaaataaaccattgacactgcagacaattacacagaaatacgtggctacatgttatgtgcaccaagcatgtggccgagatcacacatctgagaggcaagaccaggatggactggagacatgagagaaggcttcaggggaacattgggccttgggataaaccttgaaactagctttctgtttttgaggcaagggacatggtatgagcccaggcatggaggagggcatcagaaagtgtttgcaggaggcagtgagtaaaccagcctgttgtgtcaaggagagaggatgtgtgaatggcagggtgggtgcaggtcagcatgtgagagaccacaaatgccgggccaagcagtttgggctctgtaggcctgtagccttcaaagtggggtttgcaagacaataatatatgtggaagaatacgttagtgtgttatttcttttatcgcatcctgttttattattattatggttattgttagagactagggtatcgctatggtgcataggctggccttgagctcctaggctcaagtggtccccctgcctcagcctccagagtagatgggactacaggtgtacctggcttttagctattattttacatttgatatgtaatgtacataatgtattaatagaataatatataatttctaagttaataagtacacaaaagctgggagcatgtgctcagaaaggtcctttcaggtagtaggtaagagtggactctggagccagcttgtctccctctggatcctagctctgctgcttactagctgtgttattttgggtgagttacttaatttctgtgcctccacttcttctgtaaatgggaaaataaaatgacctcatagggtggctgcgaagattaaatgagttaatatgcgggaagtgggtagcaaggtctctggtatatagtaaatgctcagtaaatgttagttgctattattaatacttgctgctactgccaccaccactgctacgggcggggggtgagggggttatgattaaaaatgtaagaatcactggtgtagatggtgagtaaaagaccttgagctaaagaaaaatgtgtttaaaaaaattaatgttgtacattgaaataatactgtaaaacatgaggattcctattgatgtgtgagtgcatgagacaaataagtccattttcagcaattttgactttatgtgttatcatatttcacagagaggttcctccggtcagtcactgtgttctctgccttcctgtagatcatgttaaagattataagagctgagattagctcaaatttttaagggcagagttcttgcctatcaggttgttattccttgcacctgttttgttttgaattacatcctctccctcagatcccactggaaacttgaggaatcagtgtctcacactgtctgagacaaaggactcttttatcatgggaagggagaaatttgaagttcataaagtgaaaggagatacaggatcctcctagatagattaatctagcacattccaagtttttttttcatcttggaagatatgctttccatcccctgcgagccattccactcttactgtctgagacttcatatgactgacgataattctgaatatactttaaaaattatgcaacacaacaaaacatctcaccgtgggtacactgtcaggcttttgtcatttcctagaatccctgtaaaatatctgatggtatgtggtcccataatgtgaagggatttgtttggtggttcccaaccaataaaaatagtattatttgttgttatttgtttttagtatatgcaaatggaataggccaaaagtaagacctttgtttttattgggatagcatatttgagattgcacgtttatgtacttgtgctatagctcttagatatatttatggcacccaacgtatttgagttactaaggacacagctgaccatttaaaagcactgtggttgagtatagccaatttggcagccaccccagatgcctgaagtaaaattgacacacaggcttaaaggaaagtttaaataagtaataaaactcttttcctattttagaccatattgttgttcatgacattcttgcatttctctgtattgctacccacttcaccctttgcttttgtggcagggcttctcagcctcggcactcttgacattctttgttgtgggtgtgtgcgttgtgcaatgtggtgtgtttggtagcacccctccttcatttgtgacaacaacaaccaaaaatgtctctagacatttccctatgtcccctagggaggcagggggcggaggcgggggcaaaattgcccctagttgagaacctttgttccatggtacctatggattttccccatcatcctgtgggacaaggtgtgatacagctcttaaataccagcaaccaccaaagaaaccattcctgacccgggcagaagttgtggctcagcatactacagtgagctgtgcataggcattaatgaaaaggtagggggatacaaaactcagactggagtcactaaggaggcactttccttcctctctttctgtctttctactggaaaagtgttatgaacatataagccagctcacttttaaaatcctagcttcttatagcttgcttcatgtccttgttccaacctgcctctcatccactttcataatgtatagttgaaactgaattctgccctcctcagagtcagagagcataacattctagtttctgtttacctaaggaagcttcggaaaatgacacataattaaaattttctcacttctttacttgaaacactgatgaattgctaggtacagttgctgtctgtttcattgatcctctcttgggtgggggacaagaggctgtgtgaatgaatcttctctaaaaacagaggttctactgaaaacttaacccagaacataaaaatgttttctttgagttaagcataaagctttgtccatattcccagattcagacctcagaaaggaaactcgtggataaatctaacgggtactgaacatacatgacggagatagtaattatgctttttttttttttttttgagaggaaatctcactctgtagcccaggcgagagtgcagtggcatgctctcggctcactgcaacctctgcctcccgggttcaagcaaattctcctgcctcagcctcccgagtagctggaattacaggcacgcgccactggcacctggctaattttttgtatgttttagtagagatggggtttcaccatgttggccaggctggtcttgaacccccaacctcaggtaatctacccgtctcagcctcctaaagtgctaggattacaggcgtgagccactgtgcccagcccgtaattatgttaatattattttttaaaggaccttaaatattatacatgcctcatatatgtaaatgtctagaaagtcagtagtaaatctgtcacttgactctcaaagtagtatgatgcatacaaataagacctttaaaagcatatccttattattgcttttagaaattgtcaaataattcttatacatgtttttctttgtctatttggggaaaaaaaggaaaactacatctattatattaaaatgaaggctctctgttttggacaaaggcatatgtttgaaaaaaaaaacataagttaaatcttacttgaatttctcttgttactgtcaatagcatgcatattttgtgccttttctacatcaagtgaatgggattattaattgaggtatgaatttgtacttgcaaatgttcacctttttggccaattgttgccttcctgcttcatcctccactttttttttccttattaattagtgggttgtgtgttatagtcttgaactggtaccactctgaagcagttgttgaggtatgtatgggcatcagatatcagatgttttactgatgggcccatgttcatatggaataggtatttagaatcttggtcattttcctatttgggatgcctttttaatctttataaagtaaaatttctggtgagggggacatttttcattagcttcctgagaatcatatttctaaaaaggtctaagattatttgtttggagttttttttttttaatatcaaatggatttaagaggttttttaaaagttgtgatttcgaagagtttacaagtgccagcaaattctatcacctttgttaatcttcaaagagatcagtataattaacatcttacatgtgctgtttgacacttttttcttattaacttcttaagcctttaaaaaaatctttagacagatgagttttacatgtaaattttagtccatttatagcagatagactttatgcttgccccttcttcttttttttttttttttttttttttgagacggagtctcgctctgttgcccaggctggagtgcagtggcttgatctccgctcacggcaagctccgccttccgggttcacgccattctcctgcctcagacttccgagtaactgggactgcaggcatccgccaccacacccggctaatttttttgtatttttagtagagacggggtttcaccatgttagccaggatggtctcgatctcctgacctcgtgatccgcctgcctcggcctcccaaagtgctgggattacaggcatgagccaccgcacccagcttgccctttcttcttagattacaggatgtatagtcatttttatatctaacttgtttctgaaatgcagtttcagtttcctgctttataactgattttttcaaatatgtgagacatttacttgtccaattaccaaattgttttttgtttttttgtgggtttttttgtttttgttttttgtgttttttgagacagagtctcactttgtcgcccgggctagagagcagtagtgagatgttggctcactgcaaactctgcctcccaggttcaagcgattctcctgcctcaacctcccaaatagcagggactacaggcgtgcaccaccacacctggctaatttttgtatttttagtagagatggtgtttcaccatgttagcccggcttatctagaactcctgacctcaggtgatctgcatgtcttcggcctcccaaagtgctggaattacaggcgtgagccactgcacctggcctccaaattgttttttaagtttgtttatttagttatttattttaatttaattttttgtagagatagagtcacactatgttgcctaggctggtcttgaactcttgggctgaagcaattctcccgcctcagcctcccaaagtgctgggattacaggcatgttccactgcatccagccccaaatttttcttatactgaaaagaagtatgcattgatcagattgagagaaaattgaaatagtcatcaggtctgatttttagatgtgcatatagagaacagagatacaaggcagtaatttattaaaattcatgattgagcgtacaaatatgtgtgttcagtatgtacatttaggaagaacatgctagaaatttgagttgatgttcttcaaaggaaactcttagagtaaattagaaatgtaattacaatccacacccaccaactcaaaagggtactgagttgggtaggtttctgaagaaaatgaataccagtgtaccctagcctgtaatccccaagcagtggtaagctcttactcacacccctcgcccctccccaagagctcaacagcctcattagagaaggaggactatattgttcagtaaatgtgtcttgaagatcatcacttcttctattctggaaaaatgtgtgatttactttgttactctccccttgtcctagcttttcctcctttgttgtttctctaaatttttacttctccctcccgaatgagagcatgagtagaggtgcataattttcagttgtctgtccatttcagaagttaactcttactatcactgcactgatcatagtaagtttggtcattttaaaattcatatagagaagctggggtaggggggtagcctgtgtgtgtatgttagaccaggagtgatggtagaagcctaaaaacatctaaaatttcagttaataaaagaaacaaaataccaccaaaaagtctgcccaagaatttatgttcaagtgaatatgttttggtatttttgtataaatttaagaattgacaacgtttttcactttttttaatgattgacctttcacagatgcaataggttgctgtggagtgttagtaagcactcatttcctgaggtcaggcacagtttagagaaccttgtcactcaaagtgtggttctggaccacagaatcagcattgcttagaactggttagaaatgcagaatcttgggccacctcaaccctcttgaattagaatctgcattttcacaagatccccagttaaactcctatgttcattatgtttaagtactaattcagatgaacgtttttcaggatgctgtactggggctcccagctagtagctagatggttggaccagctgaacctaacattcggtgattggttatgcctttgtttccatgaccaacagggagatgggtgtgatgctaattatctggtatgttagcttaaactgctgatgagaacccttaatactgtaactcatatatagctttgtgttctagctgtcacgtaattctttattttaccaagaagatggtgaactcatggacggcagggattgtgccttacttatgcactgtctccaaaacacctattactaagcatatagtgagcctaggttgattggtttgattcgcttttccaacaaccaattttgatactgtcaatcatctctgtgtggttagatgcatcttttattaatattatttcttctttttcaaaatgtacatttagagccatacatgctcatttaatgccattttagtcccatcccataagtgttcatacatggtgctttctttgttgtccacttttaaatatctgaacattttcataatttattctttaacccattgattattttttgaaattaaaacattgatattgagattttattgttaaattttcttaaaatgttattttgtggtcagagaacataatttataattatattccttctttgagaattttttgaggccatttttgtggtatagtaatgtggtagtttgtaaattgtgtgcttggaagactgtgttgtgttacttaaatcttctaaactcttaactgatttttaaaacctgcttaatctgtcactttataagcagtgtgtcaaaagctcctatatgtgaatttgtcttatttcttctttaattctatacattttagtgcagcagttagaagcagtatccatgaagtggctagaatctttatgattgttatgcttttcaggagaattgttccttttatcgttaagtattttcctcttttataactgttaatgccttttggcttaaattctaattttgtctggtattgacatggtgacaccaactctcttttgcttggtatttcttgaatatcttttttatcttttatgttcattctttgtctctccaagttttagttgtctctcataaagaacatatatctgattttgtttcagtatgcaatctgatagtcactgtctcattttaaataaacttcttacttaagaatagttttatatatactgaaaagttactaagatagtacagaaagtttctgtacacccctcacctagtttctcctattgttactatcttacgttagtatgcaacatttgtcatggctaaggaagaaattggtacattactgttaacgccacacgttttattcagatttcacaagttttcacctactgtcttttttctgttccaggatcccatccaggttaccacattacatttagatgtcgtatctccttagactcttctggtctgtgacagtttctcctgctttttttcatgtttttgatggtgttaacagttttgagaactactggtcagatattttgtagaaagttcctcaatttgggcttatctgtttgttcttttttaatggttggactaggattatgggtttttgggagaaagaccactgaggtgatttgccattctcatcatgtcgtatccagggtacatgctatcacatgctatcaatatgacttatcactggctgggcacagtggctcatgtcataatcccagcactttgggaggccgaggcaggcagatcacttgaggtcaggagtttgagaccagcatggccaacggggccatggtgaaaccccgtctccactaaaaatgcaaaaattagctgggcgtggtggcacacacctgtaatctcagccactcaggaggctgacagaagaatcgcttgaatccaggaggtggaggttccagtgagccaagatgatgccactgcaatccagcctgggggacagagtgagactccgtcggaaaaaaaaaaaaaaagacttatcactgttgatgttaacattaatcacatggcttagaagtcgtgtttgccaggtttctccactatagagcttctctcctcttctgtcttttttccatactctactctttggaatcaaatcactaagtgtagcccacactcaggggcttgggagaaggaagttgagcttcacctcctgaggctgggtggggggagtattgacattacttattttgaattcttctgtgtgggaaatttgtctcttctctcccatttatttatttgttcaatcatttatttcaatcagtatggactcacagatatttattttgtacttcgggttataatccagtattacattatttattttgttgctccagttgtttcagcttcagttttagctattgggagctctttcaggttggctcctgggtgcctttgacatgccttcatcctttcagtttgtttgtttttcttccttttttttttttttttttttttttgacaaagtctcgctctgtctcgcccgggctggagtgtagtggcacgatcttggctcactgcagcctctgcctcccaggttcaagtgattcttctgtcttagcctcctgagtagctgggactataggcatgtgccaccatacccagctaattttgtatttttcgtagagacggggtttcagcatgttggccaggctggtctcgaactcctaacctcaggtgatccacccacctcagcctcccaaagtgctgggattacaggcgtgagccaccgcatccagccatttttcttcctttctggaacaagatgttctagtctcaccttgtatgttcccttttctaggtatagaattagtcatttctccaaggagacctggtttcttttattggagaatggtattcgaaaccaagattggggcactgggtatgctcatggctactagggtgttaccgtttctaggccctctcaatggacagagctaggaaatacatatatgtatactaacccatttatgcacacatgtctatttctgtttctgtccttctgcaactgtatttaagctaaacaagagttcatactgacgtctttgactctactccagtattatgtggttcattttagctttctcccttgcatatctgtaaactttgtccaacagtgagaaacctagctcctgtcatctactactcatttatttatttcctcaatcccagtatagttgcacagatgtttcagaatttttaacccatactagtgggagaaaaaaaccttacctactagaatactgtatatacatttcttttgtctttagtcttacggtttctagtcagaacatcattttccaaagttatctgtagagtacagttagattctttcaccacagttgggttcttttgtcctgatctcctggttgattttttaaacatttgcgtacattaaactttagtctttgcactataaagttctgtgcattttgactagtatgtagaatccagtacccaccactataatatcatatagattagttccacaccctaaaaactttcctgtggttcccctaagcattcctatctccacaaaactctggcaaccactgatttttccatccagtggttttgccctttctagaatgtcatgtgactgaaatcacaaaatatgtgtaactttttcattctggcttctttcagttagcaaaatacatttaatattcatccatattgaagccacagcttctttttattgctgaatactgtttcattttatggatataccaagtttgtttaccctgttcacctgttgaaggacatcttgattgtttccactttggggcagttatgaacaaaggtactatacatatttgtaagttggtttttatgtgaacataagtttttaaagcagttgggtaagtacctagcggattgctgggtcatgtggtaagtctgtgtttaactttttaagaaactggctatcttccaaaatggctttaccattttgcattcccaccagcagtgaatgagagttcctgttgctctcagtccttgtcagcacttggagtcaccagcttgttgggttttagctgttctagtaagtgtgtagtattacagtagctcattgtggtttttatagttcttgtcttttagtaggctatcttaatccatttacattaattatgattcctgatgtcattgaacttttttggttctattatttcacattttctatttatcacatttctctttgcttcttgttttctttccttttacaattgtattaaatagttgtgtgtttttttaactcgctcttcatttttaccttattctgttggaagttatagactccatctctatctttttaagaggttgtccataaaatcttaaagatattatccttattttctcctctccagaagatacggacattagaatactgtaactgagtttgcttttcctgtcttccacattattattgtctactggacctaccttagttttaatccgtcattatttttattattttacactcagtatttatgcttgctaacatatttaaccaatttctctgttcattattttttcttgcatcccactcctttcttctgattttgatttctgtcttactcaatttctgtcttatcctccagttgaggttgtccaggttgacacttacttccttcagcactttgaagatattattaggctggtgcgatggctcacgtctgcaatcccagcactttgggaggccagggcaggtggatcacctgaggtcaggagtttgagaccagcctggccaacatagagaaaccccgtctctaataaaaatacaaaaattagccaggcatggtgttgggtgcctgtaatcccagctattcaggaggctgaggcaggaaaatcgcttgaaccctggaagtggaggttgcagtgagcccagatcatgccactgcactccagcctgggcaacaaagcaagactccatctcaaaaagaaaaaagaagatactattatattgtctatgacatctgttattataataagacagctatcatcagtttgattgtcattcctttgtagattatctagtttttgtggcatttaagatttttctgttattgatggcttacagttttattatgatgttcctaggtgatcattagttatattaactatactcaagacttggtgaagtcctttaatatgaactaatatctttattaaattccagaatattctttatctccgtttctttgaatattgccatttcacagttctgtccaatttttatctctgggcttgattcttgattatttcctcagatgtattttctagttcactgattccattttcagttgcttatgtctagtgacacaggtgaaataagtacttcattctgtcatggaattttctacttcaatgaaggtgtctcttccccatcccaccctgagatctgcctcttattttctcatggtaattatgtttacttctgtcttttagtcttttcattatctctttgattgttttctattaattttttcttaaatgcccaacatcacctctgcaatattttctccaaaatctatgacctcagtctaatcatgtgaaaatactatacaaacccaaattgagggacattctacaaggtatctgtttaccttagtctttttcaagttactggttttctgtagttcctggaatgtgaattctgccttttgcggtgtctggtgcctttcccaagggttgtaattcttttttagctcatcttcaggaacagtttttcctggcagtcccctgtgcactggatggtagaggcagttgtctctggtagttttgtgtttaaccttttagggccctttctatagatttcataggtcaagacccagcattatgtaaatttcttgttcctatactgcataagcctctctcaaacctgaaattttgattgctcataaggaacaaatttttcacctctggccgcaaggtaactagattctttgccatatccccgatcagatgatggagctttctagtgagtagaacagtttttcatcgctgtaagctttgcacagtgctctcagctcagcatctaattcccctgtgggtcactgcacctcatctatcaccctggctctaagttccttctttatatctggcatttggagattccctttcttgccattgagcttggtatatttaacacattttttccttaaaaaaaaaatctatgtctaaagaggagggggaaacatcatatgtcacctcagtcaagcattgactgaattttcaaatcccttgttgtgaattagttatcaggttgatcccccttccaggcctgtggtaatggcacatataagagcatattaattattcaagtaggaaaggaccgttatctaaactctaaacaattctaaacaatttataattttgccaaaggcatttgcagactcctccacaggtagctcagaggagatgctattgtttatcccaactccccacagccgccttctctttccacgatattgtgccactcccggggctatgttctgcccaagaataggtcgtgttgagtcatagaattttaaacctgtgggtggcctgtgagccgtgtactccatgaatgggaaaacagacctgaggaggtgacctgaattttttgaggctgaggaccgtgccttactcaccacttaaaactcccagtgtctgacactggctccagcacatagtaggggctcttgaaatgttggctgcatatgaagtcacacagtcatttaggagccagaccccatgaatcttaattccctggacaaactcattctaggccaccctactttctagtcatctcacataaagaaacagattttgtttgcctcagagtagtgatgggtagagataagtgtgttgtaatgtatctaggttgccagagcctctgcgaagcccttctgaatgtcagtcattactgacatttgacttaattcgagtgtggtatttggggctcagaaacctagtaagagtctttgctgttgattccaagcaggtgttaagtgttttgcttctaagtgagacagaaataggcttcattcatttaacatgtggccttcagtaactgagacggaatgtttagaatacagatctttatcgttgtctgagggcatcctagtaaatctctaacatcacatgtagtttgggaaagggacattgcttctgtgtattttcagctatagaattaaagaaagttttgaaaatgacttaagccaaatggagaccattttttgaagagcagatggttctctgttttaaaaatgttggctcaattgtcttaggtgtttgtagaaaacaaataatcataaagagggtattacttcaggagtgcatacagcagagtgtccttgtgtcttgactgtctgaatgtagtaagacaggggaagccatgtacattctgaactgtatctttatatacacctaataaaatagaagagagcattactggttatgtgtagaatccttggagaggccagagaggagggatgttctgttttctacaggtacaactttaaccatgctgtaaatattggctctgagggtttcacaatgtttatctggcttcaggggccccttttagtctgaaacagcttgcaggtgggtggtgtttcttgtgttgggttgtgaacactgacactgatttcacgaaattctcttgcaaaatgcttttgcatgtttgtgctttgttttattccttttcttggagaccttcatagtgcaggccctgggctgattttcctttgctgtcttaacactgtcagcagttctgtaacaagattaaagggatacctcagttttcaaaaatagaagttcaggaggtttactgcccagcagaggaaagtcagaataaccagcgttatattcttttggcctacagatttttcagtttcctaaaattgtgaccttgtatttagaaaaagaaaacatttacaaaattttcctctgtgtaaaattattttgaagtgcatgctagcttcactttaacgctactcttttggaaagaattttgtgtaaggtgcattcatcttagatgtcatccagtaattgaaaagctaagaagctacaatgatgaagtataaatcagacagggaccccaagtatacttatcattttaaaattaagaagaatagagagaaaatactgtgttatattatacttacttcattcctacttggtatacagtttgtgatcttgcagtgtttattgctccattgatagtttcattgacaaactggattatgtggtggctagaggatgatataatagaaagaagttttggatccaggcagacagtcctggacttgatattctctttccccattttctagatacttgctagggcaagtcacttaaactctgaactgaagcttacccatctgcaaaataataacgcataattggcaacgatgctgtaaggaatagagatgttacatgtacaaattcccagtatagtggctggcatgatatagtttcttaataaatggtaactatcatttgcatagtttttctggttttttttttctttttggtccacgaccatttattagaaaataaatcttacctccccagactgaaagctgtctttgtcatacactgagtttcagtatatagttgctcttattttccagatttttggtcttttcctttgaacaatttgtttattcatacaccagttgctcatagtagctttacaatatgtgttttacaatttggtgtagactaattccccttcagtattattttttcaatattttatgaactttaaatcaatttgtatagtcgcctaccttttattgtcatttttaaaattaggatcacactaaactaatatgttaacttattaactatatataacatatttaattatgtgttatttagtggtttatgccattccatttgtttgtatccttatatgtcatcaacagcattacattttaaaggttccttcgtatagaatgcattttaaaaatatttcttattgctgttatcagtgggtacttttattggttatatcttttgatagtgctattttacttttgaaaatgattgacttctgtatatttgctttgtaataatactattagtcctcacttctattgcactaactctgggtcaaacacttagatgcacttacatatatttgctgattgaatcctcataacggttctagaaagtgaatactattttacagtgaagaaactgaggctcatatagctagaaagtggcagatccagagttcagaacctgtattcctaacttcagtaccatactgtaccgtgtcacctaactctcatttgctgtattatttgtaaagatcttttgtgcactaatatgttttccgttgattctcttgggctttccccaagaatattacatgtttttgattgggctgaatattataaagatgtcagttttctccaaacataggcttaatgcatgtccaataaaaattttaactttttaaactttcacttgatagtgtaattccaaaattccaaaattgatgtgcaacaataaatagtaaggatcaatgaaatgttttttgattgagattgtgttgcatctgtcaagcaatttggggaaaactgacattgttaaagtataatttcataaaggtaaaatcactctcaggcaaatataaaatgaacatgcatgtaagattttatttaactcattaattaataagggaactagaaagatgttgtgatcaatacaaagaacatctgttggtaatattagaaatgagttttcctggtgtattccaatagagagtttaaatacttattagacttgggcaggctcattggctcatgcctgtaatcctagcactttgggaggccgaggtggacagatcacatgaggccaaggagttcgagaccagcctggccaacatggtgaaaccccatctctactaaaaatacaaaaattagccaggcctgatggtgtgcacctgtaatcccagctacttgggaggctgaggtaggagaatcgcttgaacccgggaggtggaggttgcagtgagccaaaatcgtgccactgtactccaagcctgggagacagagtgagaccctgtctcaaaaaaaaaaaagttaacaactgagatttattacaagctattaatttttttccttaagagaacctagtcatgtactaacacaaattattttagacagaaaatagaaattattggatgccaataataacttgcatcaagagaataagcagttctagtagtcttttaaagttgacagttttcatagagatagtgaaaatgttgggctttttgttttaattcttgaacatcatttatgatttaaactgtgtgttatatattgtattttaaataaacatgtaaacttgtcattattttgtacactcccctaacatttaaccttaaacacccaatacatgtttgttaaatgaatgaataagagtaatgctgtttttgagtaattcaaagggtgtgatggtgatagtattttcttttctttttttcctctttgttttcctattggtagcattagaaataagttttttgggggggtattccaatggagagtttaaatacttactagacttggctgggcgtggtggctcatgcctgtaatccctgcactttgggcagatcacttgaggccaggagtccaagagcagcctggctaacatagtgaaacctcgtctctactaaagatacaaaaaattagcgaaggtgtggtggcgcacacctgtaaccccagctactgcggagattgagaccgcgccactgcactgtagcctaagtgacagagtgagaatctgtctcaaaaaataaataaatacttattagactaatgctctacacttgtcacaatggaagtcgagccactttgaaatgcagtttatatggcctgtttcctttttggtgacatgaaacaggcatgctgcatagcagaacaagaaaactcatgttgtagaaaccccctctgttggctgtgttgagtgggtggggatttgaggaccttcacactctgcaatgcaaagttcccagaggggttagaaactcctgaccctagaactccaagtttaatggccacttcacctgtcacttcatcattaaaaaagagtgagatttttctagaataaagaagaaatctcattaatttgaatttcactattttagggttttgttttatttgtgtaattctgacacatgtactacaaaaatgtaccttcctccgtgatgtttattattaatgtgtcctctgaatgtatcaggttcagaacagaaacagtacttgtgtgttttagttcacattactcatcatatttaagtaataaaactagcagctctttaaaacttattttttgtttgaatagatttctcgtgtgttcagattagtcttttcccagttagtttgttgtatgcacgttcttagacatttgccactgatgtttaaaaattgtttagctgaccacacagtctttggagactactaagaaagaagtttatattgtgaggaggtgacaacaggcagcccaaagatgggagaatatgtttggatgaatgatgacaaaaactcaacgcccaggaacgagttatcccaaccatcagaaatccagcatgaggtgaatatcctggggcctgggttttataatccatcactgacttggggagtagatatttaaacagtggggaaagttagcacataaacctagctgctaaaatggcaagtgatttttttttttagtgcaccagaaaagggaaatagcggaccctctaagcaattaagtggccaaattgcgtgtggaggtttggcaaacagaccaaagtaattcagtccatggacagcaaaatagttttagttgaagaaactgtgaaggtttaatttattttgtttgccaaggagttgatgcattcaggggtgagttaacaaaagaatcaaagagtttgaaaatcaagtcagtgatctctcccctttgtgaaaaagaaaagaatgcatgttttgttttttttctttgtctttatttttataagagcactttcttactgaatattgtttaacataaagagacaatttacttgtgaaagttcattcccctctcaacaaaaactgagcattgctctttcttatattatgaaaaatcagtatctactattaacattctaatcagtgtagaaattctaccatttaaccaccattgcaaaagaatgttataatatgtcattagacatatgtaaaaactcatcaagctatacatttcagatttggaacttcaagttgtattgctacttttaaaaaatttttgcattaggagtggtggtcagagtttaagaattatatttgataatttaaggaattatatacttcatagtactatgaagaggatattctttatctaaaaaggttccccaaggactgaagcttatggttaattaaaaatagaataaatataaaaatctaccttcaagttactatgttaattatttggcacaactcaaactccagaggctgaaaaagaaaatgttgtgggcatgtttttcagtgttcacttcaaagcagaaatgtaatattcattaatcttgttctttgattgtgatgttagctcttttgttactgtggagtttaccttggcctgagtgctggcaattaaatagcacagtgaagattactggaaaacattaacttgttattgttagttgacatcttgctgaggttgatgggaagtagagtttataaatagccttgcccctgtgcattgattttgaaatctactgagtttcagggatgaatctcattattcagaccattcattacttacatttgaagctttttatttcacagagagtagtttcatcctttagaaaaatgtaatattgaacatagctgtgatacacccttgttgaaacttttgtgttcagtattaacttcttgagtaaattagcttcctatcatttgcttaactttatttttttggatattatataagtgatgatcttccactgttttagaaaggggcctatattccattctgttttatataatttatattttaatctagaatgatctttatgtttcaaatgttttcaaataagcatccttgaacatttgcagtgttcaacatgaaacttctgtttgtttgtgagaacggtgttgctgtatgtcctttcccgaaagcggcctgccacttgaatttttatggtgcactatcagatgcaaatcattaactctgagatctctccagcatgatggtggaaagaacacagggtcaaagcagtaatccatgagggatgaaaggaagttgactctattatgagaaatctaggcagtcaaagtataacaaaagtttctagaaatctggccaaatcgccaaataattgctttgctctttcaggccaagaggcaaaccctaagtttgcattctcattctcctcattaactgatggtgtgggaaggattcagtgctattcaggtaggctttaagacgtggagtttttttgaactgagtggtggctttactgattaatcagtaaggttttcattgagtttcaattaaatgctcagtactgtgctaattaagcactgaatggatgtaaagcagtataaattcttcactgggatcttacagcatggttggggagacacaaccaacaaacctgaagtagaaacattggagtacaagaatcacatagtgttaattttaagtccaaattaattttcagtccatactcacagcatggctggaggatgtagaaatttcatgactaaattctaaagagttaagtcatttggctatatgtcttcagatctctggttgttaggacactgacaaaaacaggaagattttataggctgtcagtgtttcccagctttacctgacatgagagtaacttggggcactgatgaggatatggattcccaagtgcctgtcctggagattttggtcatgaaggcctgaggtaggacctcagaatctgccttcttaatgagcaacctaactgattcttgtgatcagacaaacttgaaaaatactggtttaagtgtggaagagagggacgtaatgtacaaaacctagttaatataagagataagttattgtttttagatctaaaggataagaaggtgtatcccccaagtgatagatattatatgtcacaaagtaatctgcttttgagattaaaggaccatgaagagcactaagaaaaccctgaaatttctaagctcaaatatttaatggacaaaaggtgttctggatttcattttatcacttgttccactctaggaagggtgatcctggtcattcatgtggagaagtgggcaggaagacatgagtaaggaggacacatttgaaatagctcatggtattagcttggcagacacaacgggagactcttccaagactgctcaaaggcaggactgaaggaagcaggagactgagcaatttagtaacaatgtttggtggtcaagatcaaggggcatgaagtaagagttgtgggaaacgagggcagagataacaataataattttagttgcacgtgatacatcttatgaagatcaagtaggtcagcagtatgtgtaaactcttgggcctcatgacatcctcatcctaaaagataggggcagggtggtggtactacttcagttttacagcttgaaagctagtgttaggagaggtgtcattgctatagacagtgaactagagaaaaaagtcagagaatttgagccagtaggttttctaacttgtgatgttaggttggatagatgttgggggactggagaagagaaaaaactatgtttgagttgaggtggtgagtctaattgttaaattttaagtgggtttcagtataggtaaattaaaaggaagttatcaacagatttaaaaagtgctgtgggccgagcacagtgactcatgcctttaaccccagcagcactttgggagcctgagacaagaggatcacttgaggccaggagttccagaccaacctgggaaacatagtgagaccctgtctccacaaaaaaaaaaaatagccggacatggtggctggcacacacctgcagttccagctactggggaggctgaggtgggaggatcacttgagtccaggagatcaaggctgcagtgagctatgatcacaccactgcactccagcccgggcgacagagcaagaccctctttcaaaacaaagtggtatggagtggagatgatgaagataaggggctaacgatgttgagagggcttttagctttgagcaaagagaaactagatttgtatggcaagtaaagttgatggttcagcacaagtatatgatataaaatgaacttttgtacctccttaagatgactgatagatgacacactgataattattatccacatcttaaccatatcttttctggtaagcctactttttaaagtagtctgcaatggagaaaggtgtttttgtttgtttgtttctttgtttgtttgtttttgtgagatagagttttgctctttttgcccaggctggagtgcaatggcgtgatctcggctcactgcaacctctgcgtcccgggttcaagtgattctcctgcctcagcctcccaagtagctgggattacaggtgcttgccaccacgcctggctaattttttgtatttttagtagagacagggtttcaccatattggccaggatggtctcgatctcttgacctcgtgatccacccaccttggcctcccgaagtgctgggattacaggcgtgagccaccgctcctggccagaaagtgtttttaaaaattaaactttgcctaggattttggtctgtgggcttttttctctccaacataacagtagagagactggaaaagcagtgaactttagaaaagtggtaaagtaggtctttaccatcccattgttgcagcgtcactcaataattgttcctttccccacagttactacaatcttgtaccttgcctctaatgacagaccttggtatttcaaatcagcacctgttgctagatttttgttttttgttttgataaaggattaaaagaagtcaaagtggatttctcagaacatttaattaatgcaggctcacaataccagttggtaatgttaggtaaacgtgtagttcacccacaaggctttttaatagatgaagaatcctgtagtcagaaaattcaaaacatgacccaaaaatattactgaatacagtctacaatattgaataatactgacttgagtgtagggaattttttaattaaatttttttaaaaaaagacacataacataaaatttactatcttaaccatttttaagtgcacagtttagtaatgttgtgtggtcacattgttgtgcagccagtctccagaacattttcatcttgcagaactgaaactctatacccattaaacaacagcgccctatttctcctttctctcagcccctagcaactaccattctattttcttgtgtctgtgagtttgactactttggtacctcatataagggaaatcatacagtatttatcttttttgtgactagcttcactttgtattatgtctcaaggttcatctgtgttttggcatgtgtcagaattttctttttaatgctgaataatattcctttgcatgatataccatattttgtttattcttctgtcagtgaacttttgatttacttccgcctttggctattgtgaataatgctgctgtacattatttgctgtacattgaacatggctgtacaatctgctgtacatgatcaatgctgtacattgaacatggctgtacaaatatctctttgagaccctactttcaattctttgggatatatccctagatgtagtattgcaaggttacttggtaatcaatttttaatgttttgaggagctaccatactgttttccataaaaatgtagggaatcttgattttttgttttacttagatggtaacttcattgggaaccttgctgatttgcttgttggcctaggtttcctccactattaagaaatgttgtatgtaaacttttgctttcctatttatattcctccactgtgttttggctacctcctcctctcttccccaccttcatatctcgatccttttgaagcagttaaatattctgcttttttcactgaattgtttttaagatctgagaaattggagattggagatcaaggtgatcatagatcactctgacctctttatctgtgacctcttcctgtgaaaactccacattcttcagacagtgagctttttcttcttcactccaccttacttaggtctttaattgactgaatccctatgcatctgtgtacagttcattagacagtaatttttattggtcggtattttactttttaagtgaaattaatttcatttcattgcatagaacccatttaacttgctaaatatgtatgtgccaagttaagaaataaaagagagagaaactattagcaattcaaatgttgcctttttctcaataagcacctgccctgcagtgaacagtgaaatggtgtcccactgtttagtggtgacacaaagatactgtctctttagtatctctatgctcaacataattcaagggtcattttttactgtacacaatattcacgttagtcacttgctttagaccctgctcccacatattatatgttattgcctcaaataaatcataaacttctaggaagttgagattatctcccttgcacccctcattagattgggagacagtgtcttcccatctgagcaattataaactcttaattttaccccctggcctatccacagtcctggcctttccatcttcagcaaatgagactaccattcacccagtttctcaagaggaacctggggatcaaggaacccaccttttttttaacttgccttctaatctactggtatcatctacttctgtacccttattctctacactgctatccttgtgcaagccagcctcatcttttgcttggacaactgcatttgcctcatatctgacctgtctgcattttgtgcgtgtgtgtgtgtgtgtgtgtgtgtgtgtgtgtcagagtcttgctctgtcacctgggctggagtgcggtggcgtgatctcagctcgctgcagcctccacctcccaggtttgagtaattctcctgcctcagcctccctagtagctgggactacaggcgcctgccaccacgcccagctaatttttgtatttttagtggagacggggtttcactctattggccacgctggtctcaaactcgtgacctcaagtgatctgcctgcctcagccttccaaagtgcagggattataggtgtaagccaccgaatctgcgtatattcttgcgccctttaatctgtactctatatagggagaaggatcttttaaaaacacagatgaggccaggcgcagtggctcacacctgtaatcccaacacattgggaggccaaggcgggtggatcacctgaggtcaggagttcgaaaccagcctggccaacatggtgaaaccccatctctactaaaaatacaaaattagccaggcatagtggtgcatgcctgtaatcccagctactcgggaggcggaggttgcagtcagcagagatcatgccaccgcactccagcctgggcaacaagagcgaaactccgtctcaaaaaaaaaaaaaaaaagatgagattaacttaattccctacttaaaacccattagtcagttaccatcacaattacaataatctaaatctcttacagttgcttataaacaccaaaatgacctgacccagcctacctctccaacctcatctcatgctgctttcctcctttcattcatctctaactccatggaccttcctctaataaccaggccttgtcctgccctagggccttgatatgtgctgttcattctacttggaaggcatataagcagatgtcaacaaacatttgctgagtgaataaacaagtcaggcgcgtcataaggatgtagactatactaactgtcatctcccaaaagtaaatgcagtacatggtgtcagtatatataatagaatgcctagtgcagtgattctccattgtgagccatttttctccacgggggcattggcaatgtctgaagataccattggttgtcactactggtggtgtgctgtcagcataagatgggtagaagctaagggctaggaaacatcctgtagcatgcaggacaactcccacagcaaagaattacctgacaacaaagaactaacatttggggaacgttagtagtgctggggttgaaaaatcgttttagagtaatacatttgagttaggagaagtcaattttaatagcagtgctggcccttcaagtctgtcatattacctaaacagcttttaaaatttttttattttctattttattttcttttatttttgagacaaggtctggtcctgttgcacaggctggagtgcagcagcagatctcggctcactgcatcctttgcctccccagctcgagccatcctccctcctcagcctccctggtagctggaactaaaggtgcacaccgtcacacccatataattttttgtaattttggtagataacagggtttcaccatgttgcccaggctggtctccaacttgtgagctcaagcaatctgcccgccttggcctcccaaagtcctgggattacaggtgtgagccaccatgcctggcctaatttttttatttttatagagagaagatcttgctctatgaggcttgagtgcaatggtgccatcatggctcactgcagctttgaactcctgggtacaagtgatccttccacctcagcctcccgagtggctggcttatttaaatactagaacgaatcctcgtgtttggagactgctttctcatcctcaggaactgtgtgttatttccataagggtaaatgccactgctccacagactcatgaactactcctgttggtgggtatcttgctcacttcctcataatgctaagctgaactcagtctttccatttgtttttccaataataaaaatgaccagtgataaccaaagttgaagacatccctctggatcagatgagaaatctccctctttctcttctgccacttcaaaggcttttgaataaacaaagttttcatgatagccaggaaactccctgttatggagatatgattcgttctacatagagttcaccattaatttcaagaagattgggattaactacggtcatgcatcacataacagcatttcagtcaaccacagactgcatatgtgacagtggtcccataagattataatggggctaaaaaatttttattgcctaatgatgtagcacaatgcattactcatgtgtttgtggtgatgctggtgtaaacaaacctgttccgctgccagtcaaataaaagtatagcacatataattatatacaacacataatactcgataatgacagcagatgactatgttcctggtttatgtatttactatgctttttattgttactttagagtatattcctgatttaggcattgttatcataggaggtgactacctaaaaaattgttaactgtaaaacagtctcaggcattgtgattatatacggtgactgctccatgcgtgttattgcctctgaagactttccagtggaccaggatgtggaagtggaagatggtgattttgatgatcctgaccctgtgtagtcctgggctaatgtgtgtgtttgtgtcttagtttttagcaaaaaagttaaaaaagtaaaaacataaaatttaaaatagaaaaaataggaaaaagcttaaaaaataaggatataaagaaattattttttatagctgcacaggtgtttgcattttaagctgtgttattacaaaacaaacagtttttaaaaatttaaagttgataaggtaaaaatgttagagcaaactaaggttaatgtattattgaagaaaatttttaaaatacatttagtgtagcctaagtatacagtattcgtaaagtctacggtggtgtacaatgatgtcctaggccttcacattcactcaccactcactcactgactcacccagagcaacttctagtcctgcaagctccactcatgatgagtgctctatacaggtgcaccgtttaaaatcctttatattaatagcatatttttaccataccttttctatgtttagatacacaaatacttaccattgtgttatagttgtctaccgtattcagtacagtaacatgatgaaatcgcctaacaacacgtttctcagaatgtatgcctgtcattaaataatatgtgactgtgtattgccttttcttgtaaatcaaaaattatggaattttaaacacatgcacccataattcataccctttgaagtaggactgcaaatgtaagatcatcatgcttcattatgtgaacatccagatatctattttgtgagactaatacacacaggaaagacgctttgcttcctttgaataaggtaaaagcaaactggccagattcacccaggaaatgacctacgttgggagctaaagtatttgttccagtgttacctgatttgggtcatttgggaaatactaaagaaaataagaatgtgctttcttagcctattttaaagagttttcctctctcagagcagtccaaaagggctagaaattatacctctggatatgtgaatttatggagcagtctcagttggaaagaatatcaagaataaacctcttgagggtcataactaatagagttaataccttcaagggtcaccagattatttttttctaagacactgagtggtacaacttattcttagatgtacatcacaaatacagaaaatttaacttatgataaaaagggcaaccttgataacaaataatgtatttcttaaagcacctgagggataatcataatttatccttgccatacatttgtcattgtgatgagctgtagtaagatgattcgtcagaaagcacagtttctgggacaatcaccacagaccactaagaaaaatagtgccaaggaacgatactgccaaaggcagaagtccagtggtcaagtcaaaacacctgccaaaaaagaacataagcaggaagcacagaggagtcaagaaagctactgataatgcagagctaggagaacaggagaaccagatggctggagaggagtgaagtgagtctccttttcacatcagcactgagagatgccgtcagttgcaccacagaattgaaaccacatgtaggctatgccattcattaataagagtgactaattttttaaagagaaattacaaagcactttgtacatcaattatcttttagacttcatggcaacctcatgggatatgagaggagttgtattattagctttattttatagatgaggaacttaggactcaaagagattaaataattttctaaggctaccagctatgtcttgactacaaagcccgtgatatgatagtaggccagggtttctcaccctcagcacaattgacattttgggctggattcttggttgtaagaagttgtcctgtgccttgtaggatgtttagcagcgtccctggcctctgtctactggtagcaccccctttcagttgtggtagatgctggtagcaccccctttcagttgtggtagatgctggtagcaccccctttcagttgtgacaactaaaaatgttgtagatattgtcagatgtctcctggggatgaactcattccacgtttagaactcctagcctgaggattaaagtatcagtctagtattagtatgagtctagtgagcaccaagagaaatatcctgttgtcccactgtcctcagtcccaataattggctaaaaggacttctttaggtggaaaatccataacaacttctctttgaactttcccaaacgatcctcatagccttccagcaatatagtgaaagggaaaggccaaaatggtttatggacagatgggtgggtgactggttgcttagagagagtcattgtttcattcagctatcgactcaacaaataaacttaacagttcctgggaatggtttcatagtggcatcagtgtttgagctgaagtaggtttagaaggaagattattagtttcctcaagatgagcttggggaaagatgaacatgtaaataacctgacatgtcagtaggctaggacttaaaaggctggtggcccacgacacaaacatattccagtcttgaggacctgtagtcattggtcatcttactttgtatgccaaaccatttgcaagcagtcttgctgtttactttcactgttgagttaactgttgccttacaagtactgtttatctcagcccacatggtaattgccttaaatttcaaatcaaatcaacaaacgtttgcactccagcaaggctctataggagataaaacgacatggtttacataaaaagatacatagtaattaagataacatatcctaggtgccaaatgagtggttcagataagtgctatggcatgagaggatggaatgattgccatgacctggaattgtcagagagaactttgcaaaggaaattggtgagctgagcctgaatggatgagtagaaataatatgaaatctttgtaatagactgataattgcactttgattaatttgcccagcacaccatgttagaaggtaccttttaggttgattattttaataccacctacatctcattatcttggaatatatctaataatagaaaaaaaaaaaagcccgttggagctggggccagtagcacatgcctgtagtcccaactacttgggaagctgaggaaggaggatcccttgagcctaggagtttgagtccagcctgggcaacacagggagatgccatctcttaaaaagaaaaaaaaaaaaatccagttaacagcttatccatgatgattgtccagagtttattgtcagatcagccaagaaaatgcctaagagtaaaaggggttgtttggttttgtttgtttgttggtttgtttttagtcttgctccatcacctaggctggagtgcagtggcgcaatcttcgctcactgcaacctccgcctcccaggttcaagcaattcttctgcctcagcctctcaagaagctgggattacaggcacccgccagcatgcctggctaatttttgtatttttagtagagacggggtttcaccatgttgaccaggctggtctcaaactcctgacctcaagtgatctgcccgcctcagcctcccaaagtcctgggattaccggcatgagccaccacacccagccatgaaaaggttttttgatgactctcagggatccgaggaggctcataaggactgatatcacaggccccttggttcagttagatctcacagaatcaccattctctgaacaaaggtgccctcttaggaaatggggctcaagatttggagaggccttactgcatcctttctctatgactttggttattacacataattgcaggactgtgggaggcatagttatcaataagggctacagaggcttttgcttaagacactgcctggtttattccacaaacaccagctgtctagtagactttaataattatgcataaaatggatgcaacagatgttcctggacctcactgctggagattttgagtggcaaatgaacaaacaaactagatggagggggaagggcaaccacccaaatctccattcctaggggcttagaggaatcattttttcccttataaacagccactttgtaaacagttgtcactttttgacttttaaagattcacagtcttttccttttgtttactttgatgacctttgaaataagctgcaaccgaaagaggggaaaaaaattccatctttatttttctaaaagaggagtctgtctgttcccacagtgcattggaagccagcaaactcctgaggctgtctcaggcccactcaggttttggggcctttaggtacagttaagtccagttgcctcaaaccccttcactgggcagctcagagtaacgtgcattaccagatgctgggtgccaaacagttttctgaaagccagtctctctttacaaggcaaattttatagcctctctaaaatctggaaaatgcaaattaatataactttacatttcttttggcctcatttgcagaggaggcaacattagagatacagttctggctcttaagaaggctgccacctatctcccccatgaacagccttctctgcccccagtgggtttctcctctgacctgctcttcagccacattgggcacagaactgaaaagtcaaaggaggagaccagagaggaagagccttgggaatgtcaaagtttcttatctttgatttctctctcggtgaaaataccacacacctacctgtcccaataattagtatgtgaattttcacaataagtagggagttagagaatatatgacaaaaaaagaatatattttagcttttattgtttctgactctaaaagtaatgtactttgtggtgataggacagtcctgtatcttgattgtggtagtcattatacagattcatacatgggataaaatggcaccgtcctcccccaccaagtggacgtgtgtagaaaatggtgacagctgaatcaggtatgcagtctggttaataatactgtgcctatgtcagttttctggttctgacatagaactatagttacataaggtatcaccattggaggaagctgagtgaaaggtacactgactatgctgtttttgcaatttgctatgagtctacaatttcaaaacttgaaaaaaattgaaaagtaatgcatttctactgtaaaactttctaaattacagaagtatacaacattgaatgtaaaaatcccactcccccaattaacaacttggcattaataaaaatgggatcataatatttttgcagcttcctttttcactttacagtatgacttggagatctttccagttgagtctatataaatctacaacttctttataatgactgtacagtttggctgtacatgacaggatatatgtaggactatcccttactcttttcaactggtcccgtattggtcatttctaaactttcctattccatacaaccagtgctgctgaagatgatccttgagcatctacacctttgctcatatctgtttgtctgtaaaataaactcctagaagtgggcataacaaaattaaagaaagtgcgtgtcttccattttgatagcaaatgccggactttcaagtcgtggttttgcccaactccattgggtaccatttgtgtagaatatgttatgtatacaacatgactctgctgattaccctccaaaaaggttgtgacaatttatacttccaccagtgatgactgagagtatcttattttcttgtccatctatcagttgggtcttactctttttaaaaaaaaagtatgtgccaaatccataggttaaaaaaaaccctcattgttttattacacttcatcaaacactaatgaaattaaacattttctgatacatttattggctatttggatttcatctgtgaattgtttgtttatgttctttgctaaatacttgcagttcccaaagtatgtggcaaggcatgggatattttcaattttagggataagcacagtgacacttgccatctgtcagacattatgtgaattactagcacaaagtaatttatagtttttagcattagctcatactacattccttttgatgatgctgtatctttttgcaaagttgagcatttggtagttgctgtgataaaaaagcaagtgccctgagaaaatccatgtggaacaagaatgagtggtggagtccaaagctggggaagccatgaagtatccagtaggcacatacatcccattagtgagtaattgtggttatttaagaatgaaaggaaaatattttttctttcaacttatgtttattttttcacacagccactaagttattaaggcataaatacttattggattgtttggacctaactacttaataaatggaactcttagctatttcctttggccttagggcaccctgaaaaaattagtgaggtactaaaggtgctttgaattgagaaagtttgagaattcctgccatatttcattcagttactttcatttttgttattgatttgcaaattttgttccttaggggaattagcagatattttacccctggtttccctttactttttaatcttcatagtagtttttgctatataaaagttttcagtttttatgttgacatatttatacatcttattttcccctattcatggctttttgtttattcttttaaaaaacacttttacctgctgattataaaacatgatatgaaacatatttcattcccttctagcatttttatagtttcttttttacatttgattcttttctccgtctggaatttatcttagtttaaggctttagataggaatccaactatatcatttcccaaaggactggttgattgtcttaatactgtttattgaatgaatcaatgttttcactactgttcaaatgtcacctttatcatctacttagcttccacgtgcagaatttctaatgagtttatttcttggccttctgttctctatttctcttatagcccttaaccgttttctgtcttaaatttcagtatgtacatcttactttctgcactacatcataagctcttcctatattggttatttttgtgtcctatacactaagctattttatctttccattcttcctccctcactaaatctttttcacatttttatattatagaaatttttagatatacacaaataatataatgaatccccatgtatccatcactcagcttcaaacattatcaatcgatggctaattttgtttcatttatgccactatcagttccccttctcctttattgcattaaaattaactgtgtctgcagtgggaaagggatagttttttcagtaaatggtgctgggaaaactggatttccacatgcaaaagaatgacattggacccttataccttacacaaaagtcaactcaaaatagataaaagatgtaaacataagacctaagatacaaaactctaagaagaaaacacaggggaaaccttgacgttggccttggcagtgatttcttggctgtcacaccagaaggtcagtctacaaaagcaaatatggataaaaggatgatatcaaactaaaaagcttctgcgagcaaaggaaacaataaacaagttgaaaaggcagcctataattatcttacctctgttaaaatgatttttaaccaagacaccggcaataatgagtgctggcgaagatacggagaaaggggaacctttgtacactgttggtgggaatgtaaattagtacaatcactgtggagaacagtttggaggttcctcaaaaagcaaaactagaataccatatgatccagcaatcccactactaggtatatattcaaaaggaaggaaatcagtatatcaaagagatatttgcactctcttgtttattacagcactgttcataatatccaagatttagaatcaacctaaggcctaagtgtccatcagcagatgaatggtgtattagtttgttctcaagctgctaataaagacatacccaggactgggtaattttaaaggaaagaggtttaactgactcacagttcagcatggctgaggagacctcaggaaacttaacaatcatggcggaaaaggaagcaaatacatccttttcgtggtggcagcaaggagaagtgccaaggaaaagggggaaaaaccccttgtaaaaccatcaggtctcgtgagaactcactctctatcatgagaacagcatgaggataaccacccccatgattcaattacctccctctgggtccctccctcaatacatgggtttatgggaaccacaagatgagatttgggtagggacacagccaaacaatatcaaatggtaaagaaaatgtagtccatatacacaatgcagtactgttcaggcataaaaaagaatgagatcctgacatttgcaaaaatataaatagaactagaggttccatgttaagtgaaataagccaggcacagaaagacaaatttcatgttttcactcatttgtaggagccaaaaattaaaacaattgaactcatggagatagagagtaaaatgatagttatcagaggctggggaggaaaggaaagggggatagttaatgggtacaaaaatatagttaattagatagaatgaataatatctagtatgtgatagcacaatagggtaactacagtcaacaataatttattgtacatttaaaaataactaaaaatataattggaatgttcataacagagaaatgataaatggtcagtacacatcgtatgcctatatcaaaatatcttatgtaccctataaatatatacagctaccatatacccataaaaaataaaatgtagccaggcatggtggctcatgcctgtaattccaacactttgggaggccaaggcgggtggatcacttgaggtcaggagttcaagaccagcctggtcaacatggcaaaaccctgtctctactaaaaatacaaaaattggccgggcgcagtggctcactcccgcctgtaatcccagcactttggtaggctgaggcgggcggatcacgaggtcaggagattgagaccagcctggctaacacggtgaaaccccatctctactaaaaatacaaaaaattagccgggcatggtggcaggcacctgtagtcctagctactcgggaggctgaggcaggagaatggcgtgaacctgggaggcggagcttgcagtgagccaagaacgcaccactgcactccagcctgggcaacagagcgagactacatctcaaaaaaaaaaaaattagctgagcttggtggcccatgcctgtagtcccagctacttgggaggctgaggcagtagaatcacttgaacctgggaggcagaggttgcagtgagccaagattgtgccaccacactccagcatgggcgacagagcaagactccatctcaataaataaataaaataaaatgtgaaaaaaggcaacctacagattgggaaaaagtatttgcaagccatgtatcagataaggggttattatctaagatttatgagtaactcatacaactcagcaggaaaatatataacccaatttaaaaatgggcaacgaacttgaatacccatctcttttatatctcaaaaaagatgacatgaaaatgtccaacaggtatataaaatagtgctcaacatcactaatcatttgatttgcattcagatgaaatcaaaaccattatgtgatgccacctcactcctcttaggatagctgttatcaaaaaacaagagataagcgttggtgagggtgtgcagaaaagggaacccttgcatcctgtgagtgggcacgcagattgatgcctccatgatggaaaacagtgtgaagattcctaaagaaattacaaatagaaccatcataagacccagcaaatcctgcttctgggtgtgtatccagagaaagtgaaataacctgggtatccataaatggatgaatgaataaagaaactgagatagatagattatgtgcagtagaatattattcagcctttaaaaaggaggagatcttgccatttgctacatgaatggaccaggaggacactttgctgagagaaataagccagacacagaaaagtgtcgcatgatcttaattatatgtggaatctttaaaaaaataataaaagtcaaatatatagaacgggagaataaactcatggttagtggttaccagggttggagtataggataggaaatcagatgtaggtcaaaggatacaaagtagcaattacgcgggatgaacaagttgaaagatctaagtacagtattaggactatagttaataacccactcttgccctggaaggtggtggtagggatgctagttactatgtgaaataatgagtatgctaatttgtttcactatagtaaccctctctctctctttctctttctctctccccctctccctctcctcataacatgttctataccttaaatatacacaataaaatttattttaaaaaattaactttgtcttgactgaacaaatcatctgcatttttttattattattattattttttttttagtctcactctgtcacccaggttggagtgcagtggcgcgatctctgctcaccgcaacctccacctcccaggttcaagtgattctcctgcctcagtctcccaagtagctgagattacaggcacaagccaccacacccagctaatttttgtatttttagtagagatggggtttcgccatgttggccaggctggtctcgaactcctgacatcaggtgatccacttacctcggcctcccaaagtgctgggattacaggcatgagccactgcgccatgtattatttttcattagtaagttttactacattaagagtttcttgttgatcttgatactctctctttcagaaaactcggtagttgaagatccagatatataagcaagataaattatcaaatataaacagctcttcctaaagaatttagacagatttattttacaaataattttataactagattttcagaaatgtatctgtgttctaaaattagaagctttttagttagagcaggtattatgttagtgtttagttaattttaaattcttcatatgcaggccttcatttgtatgttgggttaaggttgactatctgacaccactgtccaaaccttgcccttacgaacagcttgggggcccttgttgggggcccttgacaagtctcccctgtgaaggaactcataattactttatagaatttagaacaataggtgagagattatccaagacaaatgtatactttctctcttgtcaatactatttcccccaacaccttggtgtgaccagagtttacagaggtgacttttagcaccccagctgctgctgcaaatgcagcttctgttctgccacccctagcaagaccgtggtagaattccgaatcaatgaatcctctgttttcagcccctctccctgccagataaagagctctatactctagaaaaggatagtatagattgataaccatgatgatgggattaaacagttttttaaaatcatcaaattaaaggagatgttggagcactgaagagaaaaacagtgagttttagggtgggagtgggggtagttgaggaaagctggggagagttttatggggaaggtgacgtttaagctgggccttactttattaatggaatttcagtaggtggagttggagaaggtggggagacaaatgatggaacgtcctggccaggaaagcatttgtaagttgttacgaatgggaaattgttctttgtggccacagaataggttcgtaaagtggaggaaacagaaattaaatctggaaaggtagattgagcctttagtgccagcacattctttaggaggttgaaagtcattgatggattttgaacttgagagtgatgtcctcagagcttggctttaggaatatttctttgctggccatttgtaaaataagtgctggaggcagagaccaggcagttaagttgtttttagcatctgggtgcaaagtcttcttgctcctgaactaaaatagtgggagtgttaatagaaaggaggggatggatttgaggcccaaagtgaatttccagtccccagcaggctttgtgtttttgtacactgtagtccttaaagatattcacggcctgtttcctgtgattctctccccaaactagaatcagctaggaagtaattacactttgtacttagcatccttttcctggcagcaacacacaacacagtaaggtgtcatgttttggggacttagcaagaccatcctaaggatgtattcttacccaataaacaggttgaagtttagggaagcaaccacatgaaatgcttcctggctggccctctagcagattggtggattcatgtggacagcaagtgcccaccaagcactttcttctggggaatgaccaggttgaggaattcaggtatcccaaggttccggctctagcccagttgggctgtgaataaaaaacaacatgttgagctctgaacagatgatataagtaggtacttatacccagtaagcatggcaccctgcattgtggaagtcagaggcaagaggggtgctcctgagaggcctacggcctagttggggttcagttaatatgcctgaagcggaaaacaaatcctagcccacactggaatgactgcaaatgacatactgtattgttagagacctttctctctcttgccttcccaccttgccctccactcacatacaaacacaatctgcattttgaataatttttgctgtatctgtttcccagcagtgatgtgattgggcttgtttctgtgaattagaaagtttagattcctccctcagtcatctcccttttacccttttaccccctttcaatctgacctagagccataaaatacttctgcctgcctgcctgcagttctgtttgtatgaattaagtcgacaggataaatattcacattcccaactacaggctgaaacaatgtttgcctgttctacccagtgagtcgagaaaaaaagggggcctgacatcaccctatactgtacattcccagcatagatcatttatttaagtccctgaaaaaatacagatgttttaccagtcgaaataaaatcctgtgtaaacactaaggaaaatgtggcactgacttagctttgggggttgaagcagtgcagggagaaaactaggcaaaatggcagatacagaaattttatacttggctgaaggtgatagggtcaaaaatattcacctgcagtctgcatgcagcaagggaaaaacatagcatttgcttttaagaaaatacagttgcaaaagtggacaggttttttaatcttcagaatttgaggtttttaatgattacgatacatttcccccatttatatctgacctttgaaatgagcatctcttttcttattagagttgtcttttttcatagcctgtctaaccttgtcctgttattgctggatcctgctggtttctggagctcagctgctgttgattttataagggggaaaattgcctggaagccatgcttggtgaagaggaaaacccatctcagcgttgcattcccaaacaaccatatatcatcttgatcttgtctaacacaagttgctattttagtccagcagcataaactagacatattttactggtgcagtgcaagttttttcagggaactgcctcatgtctctttttaggcccatggcatttattcaaagagcatttcaaagctgccaaaatggaccccatgctttgcacagatgcctggggctcccctgagtctctctgtgtttagagtggaggggtgagggacagagggtaactgcttccaggttctccagacttctcagttcccctcaaactttcattaaggcttgcatctcaggggcaagaaatcagcctactcactgacaccctcctgcagtgcattccctgctcctcccagctgcttccatgaccaccccctcctcagggcagggctgacagtcccatctcttggcagttccatgcctatgatagtcatggatgatgctgttggcttgtacttgtttgtttcataatgtgctttcagtctttttctgattgggtcataaccatcttagggcaacaaagctttctcctgtttcttgtgctgatgacccctatgtccacctctaacccttctccaagggacctattacagctaggggtaagcatctgtcctctgtttttcccagtgtgattattaatagagctcccttttgtccctgaagaattcttttttgcgacataaattatcctaagtaaagcagtcatcacacggatattcccaaccaaactcattaattcccctccctcattcccaagcctgctgtagattctcttataatctccatcttgaaagatgccccttgttcaccagctgcccaagttaagaggctctttcctgcgccttaactccatgtctaaagcagttgccaagccctgcctctgcagcccgcagaagctctctcagatgtatcctttcctctccttccattgctgttttagtttagattggggtggggtggagatgtcacaaaatcagaatcctacccgtgccaggcaggtaagtgaaccaaagggggatgagtataaacacaggggctctctgcccattctttgttttcaaacttttagtagagatttgggttcagtaagtattttatttttttcttgattctccgaaagtttaaaacaaacaaacaaaaaagcctaagagctttgataaatggcattgaccctccgtcttagtgactagagtaacaggcaatagtaatagtggtgacagcggtggtctagagagtgcagttctcatctccggggccagctcctgctgctcagctccggccaggtgactgtttgccctacaggaaggtgggccgctatagccagatctaatttttcaaaatggaaatcaggatgactttaatgtgaaatatcccaattcataaaggttgatttaaaagtactgtatgggctaaataaaacatctgcagccacttttggcccaaaggctattggttttgagccgctggtttcaaccctcccctcctcttgtctagactactacagtagtcctgggcattccaccccttctgctatgacctccacactgcccctggcttttttctccaagttacagatctcatcacccaacagcactctctgaagaaatctttgccgtctgcagaataaagtacacattccatgacattgcctttaaggtctttgtctgactagacccgactcctttctccagctgtgtctgccaccaccctgtgcacaccctggctgttctctgcgcacacaggaccacttgttgtcccctgagtagtaccaatatttttaaaaattaagagactatttttagaaccattagatttagggaaaaattgaactggtaatacagaaagttcccaaatatttttctcctccccacctctttcccccaattttctcctactatgaatatcttgtatttatgtggtgcatttgttacaattaatgaagcagtatttacacattattattaactaaagtccatagtttaagattcactctttttgttggcattaccaatattttaatacccttaaaatgtgttttaattgttttcactgcttgcatacccttccctcgattctggcaagactgtttttaaggccacgtatgcatatcactctttctgcaaagtcttctctgactgtttatttttggaatggggctggaagagagggagcagacagaacatggaaaagaatcaacattgttatcacttccctagtgcgtgcctagtagtatatatattcttttaaatctctctacagtcctacaagttagatattattatacgccatttaccatggagaaacagaggttaagttgcccaaagccgcaaaactgataactggtttacacctatctctgcccggcttcaaaatccatgctcttccactttcccatgaggctggattcttagcactaatctagccttcctgcctccaccatcagatgaggcatccactgggatgaggagtacggcgtgattcagctctccgttccactccagacacagaagtcggcactacgatagctcacaaaacccaagggaatgtgtcctaaaggagtgaatataggaagaagcaccaaacaccaacatcgtttttatttggcaaatgcttgttgaattcctacagtgcatcagacttgttggagggggaggtcaagcatacaaacaaaagtgatgacgatgctgccatgcaggttgtaaatcatgaccaggcagagtcaggaaagctattgatttttcatgtctccatgactagaatgtaagctacaggaaagcaaggaactatctggtctctgctgcagccccttggacagtgcctggtaataagagttgtttaataaatatttgttgacaatgtttgccaatttaggacacataaaatgacactgaacttctgagttctcatgtgtgttggcagttaatcatcctccttggttctggcagctttggtttctctgtgcttggttcagtacaggcctgggtctgactgctttcttagcctcagaattctttgggaccagaactttaggaaagtgaggaagaaagagttgccttgctacttgccatcctttaagagctggtggacaaattgcccttcttgggagctgccggagctcctgagtctgaccttgatcaaatcttagtttcaaagggcctggccttatacctggacctcatgccaaaggatggtctcatttttcttgaacccaacacactaaatgtctatgaggttagttgtgtattcaaatatttttattttcttaaagaaaaatatctcaaaaacactaacctgtttcatacaattgcttataaaactttctttcctttctctttcccctgtcttctcttctccctctccttccctgccccatttttttccatgacttctctgaccctggccctttgacatgcttatttccgccacagttcttttcagcgtacctggctctccatttgtctcgtgtaaatagatcgctctccattcctggtgaataaccagggtcacaattgtctggtttgtacccaatgtgacagaattgtaggctgattttcataaaccagagctaccaagcgtttcaaaaacagtcttgtttttgccaagtaaggtgagcaaatataggactaagtttaaacatccatcaggagttatttttgaagtgattgcttctaaatgagaagcatttgaaaatctcacaggtttctttacaagtaaattccgaagtcatgcattttgctggtgtctgctgattaattgcgatcctgtgacaccatgaaaagccctggtggttggttttgtgcagctgtagagaaaagtaaagcaaagcccagtgactttgccagctctttcaggacagtggggattcaggctgaggaaggtattttttccctctggcagtcaccacataagaacagaagctccagccagacccattgctccagactccacgtcgggtggtttgggtccctgcgggggtgtggtgaaggcatgacatttgatctgttgcttctgaaataacagatccattattagacaaagcattttcagtctccacattgggacttgtgtgcactctcctgtacagttacttctgtttagaagaaatttattttgattctctaaacagaaggtgcttggcatgtatttgttgttggtgattgcagacgtctgacccagtaaaacctgccagtctacccatttagggtctgatgactctggattgattttatctggccttttctgtttctcattacccccttccgtatctaactctcaattatttcactattgtcagcccattgttgataggagagaaagagaggaaaacgttgaatctggttacacagaaagaatcattcacagctctagagaaggatataatagggaaagaaaacagatgttattaaaatagactttcagagttcttagtgtgtttatctatgcttactttgccacacccacctcttcctcttgatttagataaggaggctggagactgaaggatttctcttgacttgcatttctctccttggcactagccaaggtcaaaagatctcatttatgcccttgtccttattctttgtctgctatagatttgtactcctcacagaggctttgcggatgtcattgctgaatccagtacatacatacgtgcatacatgcatatacacgagtatccttgtataagtggggcacgtctgcattgctgcattcactcctgacatcgaagggaagatctgctaaaaaaaaaaaacaaaaaaaaccctaaatagttacaaacatcactgcccagtatttgctaaggcaagaattagtttgacctacttctttagccacgactgttctaatgaactcagacatgtaaaccagtttagactctcaaacaatgtatttttctttaaatttaagactttgactttaaaaggcacattttattttcatgtgcgacagctaacataaagatgtttgcatttctttgctgaaatcagtgtataggttgtttgtaactaataaactcttgtggcagatgattgttgggccacagtcatcagttttggggattgtgtgagaaacccatagcaaagtatggattaaggacttgggtttctcggcactgctacatcctccaaaaccaacatgcctttctgcaaagagaccagagctacattctgcaggtgtctgttttctttgaggggaacattttaaggaaacttaaaagggaggaactgagcatttaggaaaaatatattttcacagcaggatttttttttcttttttggtttaggtttttcatttgttgcaagcctactcagactccaaacacggaacgaattcagacttccagcacgagctgactgacatcactgtttgtaccaaagccaaactctggctggccaagaggtatgttaaaatcccacatgagcaaggagttatcaggggttaggaatacatttgagaattgctgtttctagttgtggggagttttaaaagtcattggcatgagttttctaaacttattggagtatttatccttttagaactttgggttgtggtaaagaaagaaaaatattttcttgacaatttttctaaaactgctaagtgactgaggggcatgtaatatggctttttgtctgcccaccaatcagcttgtttttgttgaaacctgctgcgtgcccagtcctgtgttagatattataacaatgaaaggcagtaattgactaaatcatgtggtacagactcttaggtgccgtggcaactcagagattagagattgctgtaggcttgagcaggcactgagggacagatagggtgtgaatagcaagaggggatggaagttgcctttcttaggtgggtagtaaggtagcttgaataagcaaggcaaaaaagaatagaaacatatttttcatccttgccattgttagtttatcctggaacttagaacatttactgtgtgaaagatgaaggagtaaaaggaatttctcatgtaatatacagggagtcctctctgtaatgccatgttcaaaatctgtgttgcaggactctggtggtggtaggatagtgttaactgcaaaggccctccgtaggtcctctgtaagttccaccagagtagctccagaagaggcgcatgtgttagtgttactacctttcctgccatagtacacgcatttaattaagagtcagtttattggccgggtgtggtggttcatgtctgtaatcccagcactttgggaggctagggcagaaggattgcttgagcccaggagttcaagaacagcctggacaacataacgagaccccatctctacaaaacaacgacaacaacaaaaattagccaggtatggtggtgcatgcctgtagtcccaactacttgggaggctaaggcaggaggatggtttgggcccaggagtttaaggctctagtgagctgtgattgcaccactgcactccagactgggtgacagagtgagaccttgtttcaaaaataaataaatttctgatgcttagagtttgagaaacaaacaagttgaaaaaaaaagaaaaaagtatattggctgtctaaagtagaagcctctcttttttatttttcaaaaagtgtgcttttggtcacttttgttgggctcttaccttctgtggcaagtcaagtaatgggctgtgtgaggctctcaaatcagtttaattcaacaaagcattgttgagcacaggctacctgctagcctttgtgttaggagatatagggatacaaaaatataaaagagctagtcctggctccagggacttccaggaagtgagaaagacgtgtataaataattttcatctggtatattaagtattataacaaatgtctgtagtaggtacagcattacgccagaagaggggtgagagagggctgacatcaaactggccatcaagagtgagccagaattttgccaagtggccaacacaggtaggggaattccaggcttaggtaacggcataggcagagacacagcaatatgaaacggcactgtaggtttgcagaaccataaggaagttagccctctggaacctaaagtgtaaggcacaagtggcagagaatggggctcaggaaatatgcccaggccacacagtgaaagctcctgtaagaaaccttttggtgaaggagccagcggtggatttcccaatgtgtggatgtgtgtatctcaattattgtctcaacattaatagctttggatagggatattgatggagaaattatcttgtgtctgaaatgccggtaaagttattgggagcctctcatttttagtctgttagtctattctccctttttttagacagggtcatgctctgtcacccaggttagagtgcagtggcgctaccacggctcactgtagccttgacctcctggggctgaagtgatccctccgcctcagtcccctgagcagctgggactacaggcacacgccactatgcctggctaatttttgtggggttttttggtggagaaggagtttcaacagattgcccaggctggtctcgaactcctgagctcaggtgatccacctgcgtcggcctcccaaagtgctgggattacaggcatgtgagccactgcacccaacttgttttctccattttatttagagagtaggagttgcttacccatgaagtgtttacccacgcctagtaccatttgccttctgtgtggctcttagcatcccaaagatacatatcacatcagtaccctcagctgtttgccaggtaataggccacttcttcctacctgttatttctggggatcaagaagtcagagctgtccagaaattatcctctgaaacctgcttctagccaggactgtcccaagtatcctaacactctagttcttaaagtgctgtaaggaaggagtttctgcccccttagcttgctactccttcatgcatctcgtagaaagtcattatccactggcttcctgagtccattacctcttgttggatgagatggaggagatggagcggcaggccagccattgagtggaccttcatgttgtgcagtgcctgaagatggctgacaaagctgccatcagcttcctctgcagctaagaggaagggaagtcctcctggccttttaaaacctgtcctgtggtccctattgctgttttctaattgggctttccattctcattccctctgctccccaccccacttctgatttttctccatgattttccagctctagaagacaaaggaatgaatcactgcaatttactgggtttccaccttccttgcccagaatgtaggacagccacttttctgtttccagtacagtcaactctctattatccaagtgtgaactttccgctttgtgggtggtctgtaaatggttcctaacaccaggcttccttttgctccccagcacacttttacaagtgttaatcagaatgtgttcagagcctgaaatagagtttggaaggaaaacatactgccagacagcacaatgcattccaaagctatgtatcagtttttctatattatccacatcattgacaggataactttgaggttcctaaatagcaaattatagaactgggtataagtgatgaagcctcggtgtcacatgcctgccctgtccctgaggtcctcttgttctgggagttgtctgtctatactagttaactccatgctcagacacaccccctctcgtcctagcggtcccttctcagaacagacccctgtctttactttctcacctgcctttcccatgaagatattacagtgcagagtattccaaattcaactactgaagaggcttttttatgtccctggtaatttacacatgaaagaaaaataaatgttcctttgagtctactaaggattttctgtatcttttgaatataagctatgaaaaattaatgtttttgcaaagaaaaaaatgttgccttaaattttaacaccgacacccttttccttccctaatttatttgatcattagcctgagtttcttcagtcccataagtacaaaaatgctagtggatatgtatttgtccttttgttctcaaagaaagtttttaaaaaattgattggcactattggataaccaattcagtctttaaattttgactctgaaattgagggaacataaaatgaagacttttgtcctatatttgtgttttgactttgcaagattaatagggatttatatgaggtgattaagcaatagccatggagttgttggggaatttttggtgatgagtggtcagctggcaacatggcttcaggaaaggactgggcttctgctcttacaggctgcttttcattccaggatgtcaaagccttaatggaaatcagctcattaatccttcaagtcctttccttcctgttttcctccactcctcccttcttgatccagtttactgtctaaagcagtttactaactactgaaagaaaactaaactgacctagaccagaaacgaaatgagagtagccgtctagtagggatctgctgctgtcctggaaaggatggcagtgggcatcatgagagaggaatcacccagtctgacactcatgctaattacaaaaacttttttttttaagttttttatttatttatttattttttagttttagagatgaggtctggctgtgttgcctatgctggacttgaactcctgggctcaagcagtcctcccaccagagtcttccaagtaagctgggattacagacatgagccccatgccctgccacccttgctgcttgcagattccagctcagctgtcccagctagatcgcttatttactttggctaagagttgtaattagtattatattaggcttaaacttttcagaagtgaatttggctatctagtttctccttctttggttataaaaggaaaaaaataagtgtgtatgtgtatgtttatatattgcatgtgtgtttcttttggtaaacttagtgaactaaatggactagtcagggctgggtgcggtggctcatgcctgtaaccctagcactttgggaggccaaggtgggtggatcacataaggccaggagtttgagaccagcctggccaacatggtgaaacccaatctctactaaaaatacaaaaaattagctgagtggtggcacacgcctgtagtcccaactacttgggaggctgaggcatgagaatcgcttgaacctgggaggcggaggtttcagtgagctgagatcatgccactgcattccaacccgagcaacagagaaagactctgtctcaagaaaatgaatgaatgaatgcatgcatgcagtggatgtgataaccagaaataaatatgtgccctactaaaattttttcaccgttttccccttcattgttgtgtgctgctatatgcttatcatagaaaattagtcaagtacaaaatttggaagagagtaaaagtctattcttaccacaatccataaatcactattattggttaagagttgtatgtaattccttcatcttttttcctatgcttttttttaactttgtcaaggctatactgtatatgtaagttatagcttccttccttttttcactcgatagtatcatgagagcatttgttattatttcaaactctttgtgatacagctactgtggaaaacagtatgatatttcctcaaaaaattgaaaatagaattactatgttaatccaacaattccacttttgaatacatacccaacagacttgagagtggggtctcaaagaggtttccatagcagcattatgcacaatagctaaaacatggaaacagctcaggtgtccattgatgaatgatgaatggataaacaaaatgtggtatatacatacaccagaatattacttagcctggaaaaggaaggaaattccaacatatgccacaacatggatgaatcttggagaaattatgctaagcgaaataagccaatcacaaaaagacaaatactatatgattctgctaatacaaagtacatagagtagtcaagacctagagacagaaagtagaatagtggttgccaggggctacagagaggaggaaatggggcattgtttaatggatatagtgttttaattttacagaatgaaaagggttctggaggctgggtacagtggcttagagctgttatcgcagcactttgggaggccgaggtgggcagatcacttgaggtcaggagttcaagaccagcctggccaacatggtgaaacccatctctactaaaaatacaaaaaattagccaggtgtggttgcgcacacctgtagtcccagctacttgggaggctgaagcaggagaatcgcttgaacctgggagatggaagttgcagtgagccgagatcgtgccactgcactccagcctgggcaacagagggagactctgtctcaaaaaaaaaaaaaaaaaaaagttctggtgatttgttacacaacaatatggatgtgcttaacactagcaaactgtacactcaaaaatggataagatggtaaagtttatattatgtatatttcatcacaatttaaaacattttaatggaaaatatttaaaagaaaatataccccatcattcatctgaagttatcattgtcttgacattttatgataattatttctttgcttttcttcctagttttaccacctgtgcatctctaaaaataaaatacttttgcctatttttcaattaagaaaaaaaaactttgaaaacatcatttttgaaggtagcatatttttgtcacctgaataattactcattaaatttacctaaccattgctggcatacagtttgtttcccatttgtttagtgtcgtagatgatgtttcagaaaaatctttgtacatgagtgtggtgtgtgtgtgtgtgtgtgtgtgtgtatgagtgtgtgtgattgtgggttattgccttaggtttgatttccagaagtggaataaattggtcaaggggaaatggaaaaagtcttggtatacactgccagattgttttctaaaaaagtccatctgcctaccaacagtgcgtgagagacctccaccaaaattttaactaagatataaaaaattcagttgaggaaacttttacgttttgaatgcttactctgtgccaagcttcgtatgaggagatttgtaaatattatttcattaactcttctcaaaactgccttaatataaaaaaatcttttctacagtgaaaacaactggggagacacaccacatgcctcacagccattttagttaacatttcagcttggcatgagttaacagataagtcaaacgggtacagattgttcttcagtttttactttctatattaccaaacagagatggccctgcgttagcattttgttttgtcttctttaaaaggggtcttcccctggaccctccctggggtgctgctcaggcccaggcctgctgtgcagtgtcagccagagggctcaaactgacagtgcattcgggtcagattggccatagttgtgttttgtttgacttgtggaggatttacatttctttttttaaataatttgctgacattttaaactgaggaaatttcatagtaaatcaagatctacagcttcttttgaaaaactggaagatctggcaccaccaggctcaaattcccacgtggccacaatgggccagagctaagtcccagccatcctcccttgatgagtatactctgtgcttctgcacggcccccgcccagccgcgtctctcattaggttacctgagctcccatggaaacaggagtttgtatcccttgctattggcatttattaagtagcagattggctgatgctagttcttaatgttcatggctgcgtttttagaatcatctggagaggttttaaaacctgtgatgccaggccttaccctcagagtttctgattcagatatttcaagttatctcactggccctcagaagtaccatttaaacctgatactgtggtgtggttagtggttgattgttgtggaggcttatggcacttcaaaaaaaaaaaattggggacgagtgcagtggctcatacttgttaccccagcactttgggaggctgaggcaggtgggtcaccggaggtcaggagttcaagaccagcctggccaacatggcgaaaccccatctctactaaaaatacaaaaattagccaggcatggtggcatgcacctgtagtcccagctactcgggaggctgaggcaggagaatcacttgaacctgggaggcggagtttacggtgagccgagatcgcgccactgcactccagcctgagcgacagagtgagactctgtctcaaaaacaaacaaaaaaaaatggtttttttgagagacatggtttcattctgtcacccagcctggaatgcagtggcatggtcatagctcagtgcagccttgaactcctgggctcaagtgatcctctcacctcagctcccaagtaactgagactataggtgtgtgccactggacctggctaactttttttttttttgagatggagtctcactctgtcacccaggctggagtgcagtggcatgatctcagctcactgcaagctccacctctggggttcacgccattctcctgcctcagcctcctgagtagctgggactgcaggcgcccgccaccacacccggctaaggttttgtatttttagtaagatgggatttcaccatgttagccaggatggtctcgatctcctgacctcatgatccacctgcctcggcctcccaaagtgctgagattacagatgtgagccaccactcctggcccttttttttttttttttttaaagtagagacaggggcttgctctgttcccaggctggtttagtacccctggccttaagtgatcctcctgccttggcctcccaaagtgctggcattacagacatgagccaccacactcagcccagtttttttaagttgaagcttaaatagaataactatccctgtattacttcattcaacaaatacctattgagccctgctgtatgccaggccatatcaaatactacaactgtatattaaaaccactacttcagtgtaaagagagcaacagaacagagtcttatcaaatcgaatcattgacctagaattttagaactggaaggaatctcatgaagtttattgtattaagagtctactctcacccctgtacatgtggagtactacagcccacagaggctggaggatttatccgttttcacacagttcaccagaattaacatcctacctgacaactactatcatttgttgagggcttagctcccggcaccttactgggctctttgtacttgaccacactgcctccatctatccagtgtttttatgtgagggttttgcatggcagtaatttaagccttctctagaacagtgattctcagaaagaaaatgtgcacgtgaatcacctgggaatcttattagaatgaagactctcattcactaggtctgggtggagcctgagatcctccattttgaccagctcccaggggacagagtacgtaccttgaagagccagggtcagagtgccaggctctgtgatcttccaactcccccatttgaaacagtcccatccccattgcctcattctcaagggcttgtggctgagcttggagctacaggagagggctgaggctactgaagggatcagcccaagattctctccctacccacctgggatcacctgtgttgaggggcttcatggccccagggctctctatgggaaatccatactccgttgtctgggccgccatcccagtggcctcagtgccctgtatgggaccagtgttttttttgtttttttttttgttttgagacggagtctcgctctgtcgcccaggctggagtgcagtggcgcgatctcggctcactgcaagctccgcctcccaggttcacgccattctcctgcctgagcctcccgagtagctgggactacaggcgcccgccaccacgcctggctaattttttgggaccagtgctttgttggcatgcagtgtgtttatcatttttaaaaataacagtctgatattctggtgagaaaaacaggctctcagaaatacaagaccaggttccaaggttacaaggaaagcaaccttgggaataaattttttgcataaaacagtgctgatgaggggaagagatggtagagggagctaatgtttgttgaaagcctgctcaatgtaccagacctaatgacttgctaccccaagttaattctaataatctatccacttccctgtccagctttcctgtaagtgcccttcacacccccatgcagtcctccatgtgccctttcatgtgtgcctcgtctgcttctccatccccctcatccatactccagtcactttcctgtctcctcccctgtcaccccctatccatactcccatctattctcctttttctgtcttacttactggaccccactgagctgagtggtgtgctcctgaagggcctgtggatttaagtgtttaaggaaaatatgcttatagagacaaagctgaggcttttgtgtggcaatcccagttcttccctagggggtctgtggctaactgcagaagttctggtgtaggattctattttgctttacaacagctgaaaacagcatttattttctcaccaccaaatttattcacacaagagacttacacttcccaggcagaaatactgggttttaggtctgcttccattttcccactgtcctttagctccttcccaaatccctcatgggctggtcccctcctgaagaaagagatccttcttttgcaatgacttgaaatagaaagaggccacagccttttgccacagctgcaagttgctgtttcacttccatgccgttgaaatgaatccagtccaggatgattgttaaaatattcagatgatcatgtggcattttaaggctatcatttgtggtccgtgccaaaactttaagggaagcaagtcttaacagggatcgctagccacagagcaagtttccaggcattgctaggggttatgttttgccttttggtttgtttcttttctttctctcgttttttcttctttctttctttccttctttttttctttcaaaaaaaaggatcctcctttttttaattttagaaaaagttattttttttttttaggaaaaaaatggaagaggtagtaactgcttttcaattcctagattttactggaagagagaggttctcattaggacccgtctttaatcctccagcacagcttgttcaaagtcacatgagcctcatgcagatttgaatgatgagagaaatgaagttggtatattttaaacccaagcatgctgacatatgttcacttccctttcagacgtctcaggaatgtctaaggtcatgatatctccggatgagatcctgtttgtgttttttaaatacaaaaggaaacattatcgtatttcaacccaagccagtgggacaaggtgcaaaacattttcttcattaaatatcccttttacaaatacagcctcaagttttaaaggaataagctgtttgaggaagagtgaagtttgaaaatatatgaagtatttcttgttgacagactgagcttatggaaacgagtctgggtgaaaacagtcagaagtgatcaatatattatcctgggcccttgagcaagtcgtccaagatcaaagcttcttcataccgcagcgagaaataaaaatagtccttttacgcaactgcacacacaccaagaattcaacccccaactgctgatgctttctactttttaaatatagaaatctgcaaacctaacctggagatggcagttagttcaatagagggctcagaaatctctgtcttgttccacttgtagctgttggcttactggggtgttgctgttggaagatttggacaatgttgtcattgctcagcttgcaagggagtgcaggctttaagtgtcttcagcacattctcataatattatgtaaagccctaatgtagtgggttatgttttttcctttagcatgtaacatcttccatcttttggataaattaacacctttgttaccttcattgagccattctcagtcaattaaagccaattcagagtcacaaatattacaagacaatggtttaggcacagtgggaaatatatgaatgaacgataattgtctctgtttcagaaaccccacaagtaagacaagtatggatttaaataactataaacaagattgtgtcaatgctagaattagtcaaagtgtgttgcagaagcagagaagggagaaataaatgccagcttgtcagggtaggggtgtcaaggaagtcttcaggaagagggagaagtctttaaaggataggtgagtttaattattagataaggttaattttttagcatggtggcatgggcctgtaatcccagcttcttgggaggctgaggcacaagaattgtttgaacctgggagttggaggttgcagtgagccaagatcgtgccactgcactccggcctgggtgacagagcaagattctgtctcaaaaaaataataataataagattaattgtctcagattggagactgagtaaagttacacttgtatagtacctttgttgccaagtaaattgtgaaggtctcattgcccaagtacacaaaaggtatcttagtacagcgcccagcattgtgggaacctaatgtgtgtgtgtgtgtgtgtgtgtgtgtgtattagatatatataatggagtctttgttgtcagagttcagttatggttgaatctaaatgaaaatttagacagtgaaatacatagaagtacatacagtaagtacaagagttcagaaaagaatgtggactaagatagtcaaggaaggccttatcagaggagttagatatttgagatgggcggtagagcagagtgtgatttggaaacaccaaaaagtggtaggaaaagagcatatcaagatggtggaccaaatgtgcagtgggatactggagggagtgcatgtgatgtatcatgggccagtgaggagatcaagctgagggaaagctgctgtgctttagagagcagtgcaagatttgataagagaccagttgtggaaaccctcagatgtcagccagaggaatatggactggatccaggagttaagaggaagttagtgagctctggctgacactggtaagtaggctgctgtctatatgcacatgaaatgcactaaatgctttacatctttccaacctcgcttagtggtcatcagagtttctagtctctcttaaggattaacagaaatctctctattagcagtccttgtcacctggaagcccctgttgcctgcctgggcagctagtaataggaatagagatatctgtatgcacttgagaccacataggttttgtctttccaatgttgctaagagtaccatagaaccacagaatttataacagtaaagggaatttagagatcgtctaatccagtggaattcattcttcaaacaagcttatgtggaaattcaagatattgaaaatagtagagatggtttcaatatggtctaaactggggtgggggcccggagacccacctgcatggcttccttcctgttggtagccccagaagggactaagagaagcaccctaactccctatttcaaaacagtgatctaatctaagctgatatttgtagaagaggtaatagacacgggggcaggcgacttcttcctacttgaaagatatggctgtctcagaagatggctcaaattagggatgtaaatagcaagtttgttttttgcctcttgacctgctttcttcctctcccgaggcctgatcatccttgtggaaaattctacaactccatgtccttgggctgccaagggccctctcttaggagctgccttccatggatagggcttcatgctccagaccttcttgccatcaaaacttaactattctatatcccttttcctcactctcagctggctggctgtccctaaattttaatatgtaaataagtttgttctcccgggtcacacagctgttttccagtagtgacctggtagagacagcacctttaactgaagtccgtaactgacgcaggctttacggcagtgcgctggcctggcaggagcacatctgccctcatattaagctgctcagccctgatacatttgtcccgtgtggctggggtttcggccacctccacaagggctgtgggcagcatgagctggtcttacatgaatgggccaagggagcatcttggagagaggccctcctaagtctcactagcctttccttcccctcagctgccagtgatgatcaggcttcctcagcaattagactggcctgggtgcctctgggaataacaccttcccacgcaagctcaggggctcactctaggactccccaagccagacgggtcctcaccagtccgcaggctctgcgttcctgggtaaccacaaggagagtcacatctagaggcacttggtgaatggaaagcctctagccagaaaacacagtgcagtgccattgaggagaggcagagaatactcaaggttagcaagtcagtggtctggcctctgctggactactgcccagcaaggtgtggcctgtaatttccttaggcctgagttttcatctgtaaagtgggaagctctaaaatgaaggtgtgaaatagaggagaccaggggagggcatagtgagtaatggaagtgtaaacataaaagtgctaagaagatacgggaactatctattgtcaaataacgaagtctctatcaacataatcgccacgttgaaaatgtgcctttatgctggtcctcacagaaacagctgcacttggagccttgcttttcaccagactggctaccaggatataacaccagtctacgtggtttctaattgcttggcccaatgtctcacttttcacctgattgtgtttgggacacatagatacaatttgttttctagaaaaccttgattctattcttggtttctgcccttgtcttggctaggtcacttgagctactttgttgatttataaaaatgggaatgataatttctatttttcttccttcttaagaattttataaagataaaataagaatactttttaaagagaaaacttttaatataataagatgttgatattgttattatcattcgtactatttttaccagggctaatttccaagtgtgtgccttgccaaattcacatgaccacggtcctattgacggtgctgttagaaattctccccttgtgatttacatagctcaggcagcatccagaagatttcatccacctcacctatttatccttttttatgcttttagggagaaagtaaggtttgaaaagaaaggggacttgtgttaacattctatataagatttgaagctatatatcttccaagccccaaactgtacaataaaagttttcttggatactacttttctcccataattcctagcacatagtttattaagttattaaccagcaattactctggcagcatattaaactttacttttaaacaagtcacagagggagggaaacacgcatctctcgtaaaaggaataaaaaacatacaccctctaaaacagtttccccaggctttgaacaaatcccaagccccacaccaaggtctctttttcatcattctccgcacatagcttgagtgttagtacagtaatgagaacaagatgcctaatagaaagatggaaaaatatgaggattctggaggctccctgggggctctctggaaaggcaggtgattaatattaggagggaaaggcaaaggcatggcattgaagctgtgggcttcctccagcagcagcaatcctaagggaaacagaggaggctgtggctttggccctaacctaaaaagaggaccccagtaccttttgcagactgctggggccttgctgaatgcctacccagaaccctggtaggagtgggtaaggccctctgctttcacagattacattccccaggatccaaacctgctcttccagggaaagcccactgtgctctgcaatgcatagctggaccttcagtcactttctggacagactaacagctcacggtctctcactttgtgcatggtagctcagtaagaattccgtataagttggtccaccaccagagcagggcatggaggatggcttcactttaaaaggaaaatccaagtaggagggctgtggggcagcatctacatatggctgtgagtataaacactcacaaagctccagaccaagaaaggcaggatggatgttggggcataccataaaaatgcaactctgccgtcacacctcccccagggagggcaaggtaaacgagcagtcctggtagccagccaggccctacaagcttctgccagctggccctgcatgcacagctaaactctccatgttacagtgggggaaatgacttgtttaaatatatatattctacagttcatcaccattttgcattttgatttaaacaagtcccctattgtttgtctaagagtgccatatgatggttacttggctgggggccatggtaaaaattggaaatcggaatggcagatgtgggttctttttatttaatttatacttccacatttacatggcttaatgtggcctccatcaaaagaagtacctcctaactcctatccacaggatatagccaaatataaggagaggcagtatctggtccatggacagctgttacaatgatgtgaagtgctcaagactacaaagatggccagtgggatctctgggagaaggggaagctcaacaaaatatcctgggttcagacagccattcagcgtatcctcagaggtagttgtctggatcattagaaaagtaatcctctagaaatagaggaggggctttgaagtgagttggtttttaggggggtttgttgttgttattgctgtttgagataggatctcactatgttgcccaggctggtcttgaactcctgatctcaagcaatccttccatgtcagcctccagagtagctgggattataggtgcctgtgccacctaaacccagcttgaagtgaattttaaataaagggcaggaggcgggtagatatgtgtcaagtggagggatcataatgggatgtggaaacatgttgtagactaatttcccctttttcaaccattttccctctcccattcttctaaccaccccccctctttacttctccccccactccccttctcacctgccttctctccctttgcctctcacccacttttcctcttaacctggtttccttctttccagcccgttatgggcctgctggtggtccctaggatattgcttcattaactccagtgctggctccatgacaagaagcttctagtacttcttgcttattgtggttgagaacagaagtgatctgagctgcttaaataggagctaagataagagaactaccccagatgggctgggatgagcctgccagctgcacctgtttgattttttggaattccttctctttcaccagctcaaacccctccaatgcctctagagccttcctccatgacaatcatgacaatcaaatcaatcctctgtttttatgtgtatttttttctccacatatacccctcccccaacaagatcataagctctgcaaagccataaccttttcctctccctccccttcccaccccatgtaggatatcccccgtactgctcagtaaatgtttctgtattaataaagttaagccatgtgtcttagagaccttaacagacagtagcaacctaaagccaaaacagcagtttccagccctctgaagatggcagtgaattctggtagagcttggtaagtccaaagtgaattccctctctcttccaggaagcccaccaaggcttcacaatattgagtggggaccccagctgtccagtgtgacttgagcttatgggatcccactggggtcttcattctttggaacttttagagctctgaaagactacttctgtttcgggcccctgttgactcatcccatatcatttcctgctaatcccactggccatctttctagtcttggcagttcacatcattgtaacagctgtccatggaccagacactgcctctccttatatttgattatatcttgtagataggagttaggaggtacttctttgatggaggccacattaagccatgtaaatgtggaaacataaattaaataaaaataacccacctctgccattccaattcccgccccccataccattgtcccttttagcacttgttattctctaaacatgtcatgtccccaagtctttggacatgctacttcctctgttgtggtcactttgcccaggtctacctcctccccattctccaactctctgccaaggcccttcctgactcacccagacaaacagttactctgttaatccctccttttggggcacccatcatactctagcatgactggttgtgtgttttcccaactacactagtggctttcaagtgtttttttttttttttttttgacagacattgacaacaagaaacagcttttacatatgacctaatgcatatgtttgtgtgtatatactgtgcacacacacatgaaatcatgcacagtcggaaattttagtagctgcgtaagatataaattgccaaaaatgcaacagagagggaatttgctcaagatagagcatatttaatttcaggaatgtgtgctttcaagatatccactgccattttggatacaaagcataaccctattgatgccattcagtataatgtagggtagcttattacctggaaaagaaaaagaaaaaagctagaccagtcaattattttacttaaacttgttgcattttaatggttatttaaatcttaaagataacttattaaaaattattcttagcaaggacttaatggaaagctgatacataacaaaaaccttagtgaaacaatcccttgggaaatctctgaacttctttaaatctcctgccctctgtccttactacactactttgatacactctgattatattttcctcctttctccctctgtcttcctcctagctccttttctcccttcttcttctgcccccatctctctcctcttcccttcctccctccttcccttccttcctttcttcttccttctttctttccttcctttattgctggtcactacccactagttgatttcataacctaacatacatttggaaaaacactattcaggactctaagttccttgagggcagtgactgtgtcactgaatcacttcatcttcctatttccaaacccaccactattcctggctctcagtagcctcttaataaatgtttcctgaatgaataggcctcagttaaaaacaaaacaaaaccaaaaaaaaaaacctgcagccactgggattccggaagggacaggaaaagtgaataatttatcacagacttccccaagacttctgctgtcctctagacactggggcttttgtggacgtgtctgggaagccctgccctctgcctgccttgtgcctctcccaacttccaggagagagggcaggagatttaaagaagttcagagatttcccaaggcaaaaacatattaatcaagttcttaagtggatatttaaaaggacaaatggtaaaaaagagtggaagaaaacaggattcttaacagggccttcgtttcatcttctgtatgtcaacttcgtccgcatagtgctggattccttctcctccttcgaaagccactagtaatgctgcttttcagtgcatctgctacatgctgatcacttctgattttttttgagcactataaatcttcattatgctgtgctccatgccaggatttttccatttgggggtagaaaaattccccaagcccaccaaaaccctgtggcttagtttcctgtccagctggcgtgctgctcttcgggattttgttcccatcatcaaagtggcttgacagactgagaacaaacctctggctcaccctgaacttacagtgcaccatttccaagtcagaacaaacaccaagtaatagcaagagaaaaagaatgaaaaaaattattttcctgacttagaagccagttcagagtgaagcccaactctgtgactccagacagggatgttataaggccttggctgtcctcaagggtggagtcatgaacagtgggctccgggctggaatttcactcagagtcatctcaaaggagaagccatggatggactcctttgtggccccaaatcttctgtttcctggaatccaaagcagcagcatttgagggagcctcccatgatcttgttgactacatcacacttggccccaagcctcacagttgtgggagcagtcagtgattcctgaagtgtcccaggaggccagtaaggtcaccagcctgtaccgggtctagggaagatgcagaacacttcagcctggcagaaggctctaaagatcgtcaacctttcctctgttcattttgaaatttttaaaaatatgctaacttagctgaaaatctcatggaaaccaggctcctcatcagacttgaaagtcaaaccggtttctcaacaacttctctttatggttctgtatggctccacagaaaaccagaaaaacatttggggcaagaagctatgactctgtgaggccacatgggagcaggcagtcaattattacactaaggaacacccagttagcatgaagtatcccatcacttaaaagcctgaccagccttcctcttgtttccaccttatcaacgcattctcttatcttcccaagctgccgctccttggaactggagaagccaaatgaattccctctcacatctcttaccctctttccaaatgcccttccttatcaactttgtctctaaattcttcccatcttacatggcccggttggaagtataacttcatttctccagtccaccctggtgggttggtgggttggttggttggttggttggttttttgggttaactccttacatcctattctgaagtttgtctttgtttttgtctccaaaactagtcaaaattctcaggtcagtagccgtctcctgtgcatgtcctccctgcacctagctcaaggctggatgcacaggagacatcctatctgctttctcaggccactggctttcctccctgaatggctcttgctttagcagggggcagtctcaactagtagaaattttaccattgggaatgatatcaatgaagtttttatagactgtgggctttccatagtggatggaagagtaacagcagaaagttacgattgagagtcccagggtaaactagagacaaaagataggggcagggttaaaaagtagaaccccaggctagacaatataacaagaccccatctctacaaaaataattttaaaaattagctggatgtggtggcatgcacctgtagtcccaggtatttgggaggctgaggtgggaggattgcttgagcccaggaggttgaggctacagtgagccatgatcatgccactgcacttcagcctgagcaacagagaaagaccctgtctcagaacaaaacaaaacaaaaaagaaagaaaagaaaatgaggcaaatctctatgttcttaatagaatggtatccaaaacatattagtgaaaaggagtgatgatcagaaccgagtatatagtaagccatcatttgtataaacaagtgggtagcagatagatgcttataaaagaatagagcctggcgcggtggctcacgcctgtaatcccagcactttgggaggccgaggcaggtggatcacgaggtcaggagatcgaaaccatcctggctaacacggtgaaaccccgtctctaataaaacatacaaaaaattagccgggcgtggcggcgggcgcctgtagtcccagctactccggaggctgaggcaggagaatggcatgaacccggcaggtggggcttgcagtgagccaagatcgcaccactgcactccagcctgggtgacagagagagactccgtctcaaaaaaaaaaaaaaaaaaaaaaaaaaaaagaatagaatgtgcttggaaggatatgctagaaagtagtaatagcggttgcctcgagaacagtatatgggcagggggtagggttgtggaaaagggatttcattttcattgcgtgtccttttgtgctttttcaattatttttgcatgtgttacctatttatttatttatttttgagacagagtctcactctgtcacccaggctggcatgcagtggcatgatctcagctcactgcaacctctgccttccaggttcaagtgattttcctgcctcagtttcctgagtagctgggaatacaggcgcccgccaccctgcccggctcatttttgtgtttttagtagagatggggtttcaccatgttggccatgctgatctcgatctcctgacctcaggtgatccacccacctcagcctcccaaagtgctgggattacagacgtgagccaccatgcctggaccaccagcacactcttaaccagcctcttgtttttcagtcttaccccctgtaatcccagctacttgggaggctgaggcaggataatcacgaattcaggaggtggaggttgcagtaagccgagatcataccaccacactccagcctaggggacagagcgagactctgtctcaaaaaaaaaagtatctgatacatatttttcatgttagacatacaccagctccagatataggcaattcaggatagaggtgtgaataaactttaaggaaattgtaaaacttagtttataggaaatgagaaggatggatttcaggattaagccacatggaaactcactagccagaacacttgtgccaatatcaatgccatcccctaatcccatgttggaagtagagaagggcaaggaatggacagttctggaacatctgccatggccaggcactgaggtgggcattttaagtttactgtgccacattgaacactcacagtgactcacagtaagtctgtcttagtccattttctattgctgtaacagaatgtatgtattgtatttattgtaacagatggcactggcatctggtgagggtcatcccatggtggaaggctgaaggcagaaaagagcacgcaagacagagaggaaatcaagccaaactcatctttataacaaactcagtctccaaatcactagcccaatcccaagataacaacattcattcattcatgaggacagtaccctcatgacccaatcacctcttaaaggctctgcctcttaacagtgttacaatagcattacatttcaacatgaattttagcaggggcagtcaaaccatagcagaggtgataatacagttcccattttacaagtcaggaatctgattcaggtcacagagattgtaagtgggaaagccaggactcaattgtaggtctgtccctactgtctctactactcacattgtattattagtacaccaaagacgttttggccttttcatggccaaagacactcaagagtcaaggcccttcagtgctgttcttaaaaagaaagtctttcttcatccttttgtatatagatacccaaatctgagcccacttactatttctactatgttgttcaaagagctgctccatatattgaatgaagaaaaaaatccatttattggggaaaatgtcatctccagtgtttgttaatcttgccatgtgtctattgttcagctggttatttcaagtccacagatacagcttttcatatgtgagtgtaattttccttctccacaatactaaatctgattttcatgactgattttttttcccccaaatttctatacttaaaaatgtagaataatagagtaccatctccccaccccttctgtcccatcttattttcaactaactaagataggatcttggtgtttgttttcattttattttatttgaagccagagcatagagttgttatctattttgtctacacatagccttggcctccatcatatggtcaaggatttcatttgctcacattagttgcttattttcttgccatcaatgattgtacatcatttcttaatatttgccatagctgcttaagccccatcatataccatagaaaatacccatgttctccttcctgagacccagacctaagggagagaaaatctcaatttatattctgttctttacctttctaggcaaaatccatgtttggtgaccagagctgtatatattgatattctcttcctattgacttgctgcctcaacagatctgcaaaggacaaccagccaggtatgattcatagttatactgtattttggaatcgttacacatctttgaaatgtggatggcgttttgagtggctctgccacacactgctccaccttctacttttgtaagactaaccacacatcaaaattaaacagtgtcatatagttccctcatagaagtttgtcagggaaacttgttcttgtttatttggaagtttgccgtttattttctagttggtcattcagggaagagtgaactctactcagataccctctctgcatctacgaccccggcttttttctattttatgtattttctttgaaaggtcattattttgaatagctgtgagttcattctgttccattctgtggagataactgagctgggctcatttgatgctgggtatttgagactctcttctcaaatcgacccctacaccaatgcacttatgagttgctgcctcagactctgactttccacatgtttcttggtcatgtaagtttctggggatggaccccagatccacatacagttgctctattttaatcatgatttgcaaagtggtttttcttttttaagggaaaatggcaactccaaataaaatttttttgatgtgtttatataagaggctacaggaagtgctgtacatgaattccaggccacggactgaaactgattttcatcagcacaaactggaatgcagggtaatgagtctgcaactggttaaaatcagcctcttctaattgattaggcctgtctaaaggaggctagaattacaaagtcagattctgagtgcaagcagaccaggcctttcctctgttacatttagtctgtcaatgatttgttgtcttcggtaaatacattcaggctgtcaatgttcagctctgttcatatggaaccctgttcccaaattcaaaccaatttaaaatgctttgcaggagggaggtcggggaggtgggagcatgcaaaaccgtctcacccagatcgatgtatattagcccacaaaacccctgtggccatgcagaggtaataagaacgtgctagactctcatcaagtccacatccctggataggagtagctgttgtatcctctttgtagtgtaaaatcatatggttttatagctataaagcaatcccagtttatgcctcttatcccagcataattattaatagtgcgcccttttactcttgaaagtgaccaggtttgcataataaattactggtcaccgtggctgtaagggaccacagagttgcatctactccagcttacccttaagtcaactggagtctaaagtttaaaaagagactatgaatccaatgttaccaagtaaattgctttagatttccaccatttctgtatttcagttccaaattccatatagctttgtaatacttccctgcctatgtatctaaagggctttggccataagagatttgttcattgcttacaaatctactcactgggattctggcagtttatggttgactataatcattagtttatttgaactgagtttttcttggctcagtgccattattctttgtctagaatggttaatccttatatgttgtaaaataccttctttcttccccaactacccatcctttactgatgagctgggttccttgaagatgactttagcttttttgaaccatccatttctccaagctgttaacattatttagagtttataccctaattaaacagatcacagcttgttttcacaagctgtgtttaataacttaacagtatttcacttgcatctatatattactcttaaagatgttactctacagagtaagatgtgaggacaggatgcttttattctagtatgacaaccatagctctaaaaattttgtcctgcactatccaatactgcagccactagtcatatgtggatcttgagcgcttgagatgtggttggtccaaaatgagatgttttgttagtgtaaaatacatactacatttcaaagacttagtatgagttaaaaataaaattcctcaataattttgtattaattatgtatgtgttggaatgatgtttttgacatactggattaaatttaaaatgtattatcaaaattaattttacccgtttcttttactttttaaaatgtggcaactaaggtcagatgtggtggctcaagcccataattcagcactttaggaggttgaggcaggaggattgcttgaggccagaagtttgagaccagcctggcagcatagtgaggcctcatctctaaaaaaaaaaaaatttaattagccacatgtggtagcacacatctgtaggcctaggtacttgggaggctgagacaggaggattacttcaacccaggagttcgaggctgcagtgagctatgatcatgccattgctttccagcctgggcgacagagcgataccctgtctcaaaaaaaataaaataaaataaaataaaatatggcaactagaatgggaaaaataacaaagtaaaactgtcattgaaatatatgtgtttaactttgtcaaatggagagataggaagaattgtaaatgacatcataacccaaaaggtacattacagtaacattattaatgatgaagaatgtggctgtttacattttaaattacatatatatgactcatttttatcagacagcacaaattttattcagtcctcagggaattgccctcataaaatcgctagatgtgtttgtatttatgtatatgtatgaatgttcatgttcatataatacatccacacaaacagtaggagcatattttctttctttgaggatggaatagatttttagaaataaccaaataccaaataaaatggcaattaagatggaaagcactgtttgggataaaaataaactgtgcttaatgtagtgaagtctattcttgtgtgttttataaattgttccccaaaacaggttgagcaatagataaatatatcaccaaataaggtgatcacttacttggatgtgtagatttcaatatgctttcaaaataatgtgatgatattatagttttagcatataagctccttgaaagaatggaccatgtcttagattctttgtcgtctaagcacatagtaggccctcattaaatggatttattaactgtttgatgaaatgcagttctcctcagtttttagaatagtaacagctgttatcaaaatacagattttatttaaactcatgtatcaaatagatgtgaattcattttctgaattcaagcaaggtgtttatgtgtgtatgtaaatatatatctgcctccattattagctcacaaagtccagagtaggaagtataccacatagactgaagccaaacctctgggtttgaatcctagatctgccatttactaactttgtgaccttaggcaagttatttagctgctttgagacacgttgtttccattgtaaaaggggacagtaagatctatatcttagagtggttgtcagcttatacatgtgaagctgtctgtgaagaatgtgctttgcatggcacagaataaatgctcaataatattaactattattaatatttttttgttgacatggagtttcactcttgttgcacaagctggagtacaatggcacaatctcggcttaccaaaacttccgtgtcccgggttcaagcaactcttctgcctcagcctcccgagtagctgggattacaggcatgtgccaccacgcctggctaattttgtattcttagtggagacggggtttctccttgttcgtcaggctggtctcgaactcccaacctcaggtgatccacccgcctcggcctccctaagtgctgggattacagatgtgagccaccgtgcccagcctattatcattattattcgctggaagctatgcatctaatccagtctcctccagccgtgcagcattgtgttcacctcctcgccttcactgttctcatatttttaaacatcttcaggaaagaagaaatgcctgctttcctaggaaaacactgcagtataacatacctggcttagaatgtcaggagtccacttgattagggttgcccctgtccctctgactgatccagaaaaagatcattttttttcttgtttatttattttttcattcatcagacctgctagcctcagagatatattgagcacttgtatctggagatagagatgaatatgccttggtcttataagtaggtgcaatgaaggatttttcagatgctgtattaaaggaagtatgtatgggacacatttgaggcactaaagaaagatcatttctacttgagaggacaggaaagacttccttgaagaggaagtggttgaacagagttttgacagtgggtagggattcaccaggatgggcaaggtggaggtaggtattacagacagaggtagaagcatggccaaagctgtaagggcacaaatcaagcacagccttcagagcactagggacatggcaactggggtgttgggttcaaggccaggcaggtgtgactggtgaggctgaggaggcagaaactcagtcatggaaggcctcattcacaggccaaagtccaaggagcctcaatttgaccctgtagacaaaggagttcattggacgatctaagacagagagtaggactgtgtggtttttaagacaatgtgacatttctttctctgccctcatccttacaggatttttaggacccttatggaaccaagttcctagtgtcactccaaaataatgtaactggctggatgcagtggctcacgcctataatcccagcactttgggaggacaaagcaggaggattgcctgaggccaggagttcgagataagcctgggcaacatagcaagactccatctctacagaattttttttttaattagctggacatggtgttatgtgcctgtagagtcccagatactcaggatgctgaggcaggaggatcccttcaacccaggagttcaaggctgcagtgatctgtgatcacaccattgcagtccaacctgggtgacagagcaagatcctgtctctaaaaaaaagaaaaaaaagaaaaaaaaagaatgtaactggagatgcattcactttgcttttgcccagccattttgataatcaatattaggggtttgggaggtagggagtggggaatggaggaacagactagaatgaaagccagcgctatggtaaaaggaattattttagaatggtgggattacaggggagattccttctcttattttctattttactaattttatgaaacataattctgtttcattatgtgtatatacatatgtttaaattaaatgtatttaaatatgaatcttgaaagggattgattattccaaaggaaatgaagtaataacaatttcagggaaacttttttggatggaggagcatctgctcatcccctctccagtcctattctgtaaatggccttggaaggctgttcctacctctgacatgtcttagaaccacgttgaagggctaggggcataaacaaggagaaaaacagtgaaggagaaaggcagagaagattattagaaaagcttaagataatgatgtgttttatgtaattcaaacttttatcatagtgcttcccaatcatttgaggtttcctcagccattaactaggttttaaaattttcaaatctgggggttttgttttgagttttaaacccacaaggactctctgtcccctgtgttctttttcctcttctgaatccagctgtcatcgttagtatatatcagtttcctgctggaatggaaagaaaattatagtgtccagttgtagttgagggaacaagaaagaaaaagccgaactgccacaaggactcagagggctgggtctcaggctgggcagcgacatggagacgagagctttaattcttatattaaacccatcttaaattatttgctctcaggttggaaattttccattgaaatttctgtttacagaaatactatctaagacttgactaaatatttacccctttgacagatggactttctgtttctcttatgcccacaccccttaaaattgtgtctgtcacagctactgaattgaacattttcttttaccaagtatttaaacaaatacctacctgcactttcagactttcattttaagctctcttgttgggttttatgagcgggtttttcctttcctagtctccattttataaattttatgcaacttggttcttttataattatgtgtatgtgtaatatattgaaatatgactcatgaagaggattgattaatcctaaagaaatgacatagcaatcatagataggaatattttaggctgataaggatttgtccatccatacccttcatataaatgatctcagaaggctgttttcctacccctgaaatatggataggatgcccattataccctcatttttaggaaacattgttttcaatctcatcctccttgtttgtagggggctataataatagtggccaacatttattgagcatctatctctatgccaagcactgccaagcattttatgtgcattaatgaagaaagtactaatgttccttcatgagaccacagaaactgaggcatagcgagaagtgcctaacatcccatgtgtgctaaggtggcagatcctgagctctccagctgccctcactgtggcctcacggcacaaccagggccagagtcaggaaacatcagtcactcgcttagggaagggagtccgagaaccctcttcgtggactcaacttcccaggcttctgtccctgctgcagaatgcccaggccacagagaagggacccccttttcaggagcttccacgtcacaggcttttatggggcctttcttgcttgtgtttctgtttcccatcctgagggtgtgtggaataatacgagagcctacccaggactggagcgtgttattagaaagagcacgcttgactgctcccgggcagccacctgccctttttcccttggaaagtggacctatggccactgcacaaaacacttcctaataccaggctgctggtgactacattttgtggtttctttgttagttgatatttatagttcagatctcatcactctgccaagtgcaataaacattttgttttaactggaatataacttttattattgttattatttttcttttaaatgtcttaaaagtgaccagcttgtgcaagtggagtcagaaaccctaaatagtctaaatgccaagtcagtgcgctctgtagatcagtgtacgattagaagacaggctctcatttattactgcttgtatttatataatggaagttaggtaacataagcccctctgcaggccagcttagatgttgatgatgcttaaatggtaaaatctgtgagaaatgttcaacaatgccctgtatttgtactgcctaaaacatgaataatacatatgtgacatgaataaataggtcagtgatttttatgacatattaatttcctttacctaagttcctgggaaatatagctgaacagttacagagaatgaaaacaaacactggcatcttacaaacacctgctttgattatttagtctaattaggttaaatttaactatttccattttaacaaattgaaaacaattcttatctgttcctcggtcatgcactttatcagtgttggatgcagatgtgtttaatatgacacagttggtgctgttttctcagctctgggtgggaaataaaaaggaattgagaacatatttttagagtcttctggggactttgtatttctgggcctatagctatgaaattttaaggaggaggaaaaaaaaaaaaaaaaaacaggctttgttgtcaataaattagttggttttccccaaaacactggaactgtcatctgaactgctgcttgtgccaaaattatctttcccagggaacagtgagcttctaaaataacagatgtttcctagctgtctttcagaagtcagaataatatagggtatgttattagattgctaggttaacgtggtgtttactctgttaattccaaaccttgcgctgagtacagaggcccacaattctttagaaatttagtttagagatcatagcaatttaagtgacttacccaaggttacacagctggttagtgaaaagggtgagctttcctgactccttattcaccgtccatttctgtgaccaaagttaaaggcctcatataatgtgagagttgtgtctgtggcagaaccgtgtcatgaaaccttctacccacattttcatcccaggagtgaaataccgttctagtcaacaactagggtctcagaacatctgtgatttcttttttttttttttttgcagctttgtcacccaggctggagtgcagtggcacagtcatggctcgctgcagcctcaacctcatgggcccaagtgatcctcctgcctcagcctcctgagtagctgggaccacaggcgcatgccactatgccaacctagtggtttttctgtttttgtttttaattttttattttgtagagagaggtctccctttgttgcctaggctggtctcaaacttctgggcttaagcagccctcctgcctcggcctcccaaagtgctgggattacaggcatgagccaccatgaccggccacatctgtggtttcagtgttctctgttcctgcctttcccagctccagctgcacatcacagataatctgaaagtagttgcccatgtcagttaaatttttatgcaagtagtttttgaaagtctatttaagatatttcatgtaaatggaatcatacctttgtggcctttcatgtgtggattctttcacttaacatgttttgaaggttcatccatgttggtcattttgttctttttatggctgaataatattccagtatatagatatcacattttgtttatccattcatcagtttgatggacatttgggttgttttcacttttgggttgttatgaataatgctgctatgagcattcatgggcaagtttttgctgggacctgtgttttcaattctcttgggtatttacctagaagtggaatgtctgggccatatgccaactctaagtttaactttttgaagaattgctaaattgtttccaaagagtctgcaaccatcttacatttttaccaccagtgtatgaagtttccagtttctcaatatccttaccaactcttactgtccatctgttttattaatagccatcctagtgctgggatctaattgtgcttttgatttgcatttccctaatgactaatgagtttgagcatcttttctagtgctagttggtcatttatatatcttcaaagaacggtctcttcagatcctttgcgcatttttaagtgagttgtctcttttttttttttgagacggagtttcgctcttgttgcccaagctggagtgcaatggcacgatctcggttcactgcaacctccgcctcccggtttcaagcgattctcctgcctcagcctcccaagtagctgggattacaggcatgtgccaccacacctggctaattttgtatttttagtagagacaggagttcaccatgttaaccaggctggtgtcgaactcgctacctcaggtgatctgcctgcctcagcctcccaaagtgctgggattacaggcgtgagccaccgcgcccagccgagttatttctctttttattctcaagttgtaagggttctttttatgtccaagatattaatcccttataagacacacagtttgcaaatattttctccctttctgtggatttttactgtcttcataatatcctttgatggacaaaagtttttagttttgaagtccattgtatctgttttttattgcttgtgcatttgatttcatgtctaaaataattgcctaatccaaagtcacaaagatttgcacccatgttttcctctggaagttttacagttttagttcataagtttatgatccatgttgagttaatttttatatctgataggaggtacagattcagcctcattcctttggcatatgtgactatccatttgtcctagcactgtatttcaaaaagactatcctttccccattgaattgtcatggcacccttgtcaaaaagtcagttgaccataaattaggggtttgtttctcgattcttaattgtattccattgatctatgtatctatccttatgccaggagcacactgtcttgattatcattacttcatagtaacttgaaatcaggatgtgtgagtcctctttcttcatttttcaacattgctttgcctattctgggttccttgcattttcacatgaattttaggatcagcttgtttggggggggggcgggaaagggagggagggagggagggaggaaagaaaaagccagctggaatcttgatagggattgcattaaatctgtagatcaatttgaagagtactgccatcataacaatatgatgtctttaaatccacaaacactggatgtctttccatttatttaggtctctttaatttatttcagtgggtgttttatagttttcagtgcacatatacttcatgcacatctttcattaaataatttgttcctattctttttgatgctgttataaatagaattattttcttaatttcatttgtggattgttcattgctactgtatagagctacaattgatatttgtatattgatcttttatcctgcaacattactgaacaaacttattagctctaataggttctattgtggactccttttttcttgactaattgctctggctagaacctccaatacagtgttgaatagaagtggcaagagcagacatcttgtctcattcctgatcctaggggatcttaaagcattcactcttttaccattaagtatgatgttagctgtgggttttttatagatgccttttgtcaggttggagaagtttttttccatttctagtttgttgagtgcttttaccacaaaagaatgttgaattttggcaaatgaccttgctgtgcctgttgagatgatattgtaattttatccttcattctgtcaatatggtgtgagttgtgacattttattgctgagtagtattccattgtgtgtatggcttgtttatactaatttactagttgatggtcattagggtcgtttccactttttggagatcgtgaataatgctgctctgaacattcacatagaagtgttcggtcatatgttttcatttctcttgggtaaaaacctaggaaaggggttactggatcatatgataaggattgtttaatgttacaagaaactaccaaaatgtttaccactttgcattcccaccttgcattcatgagaagcatggctgataatgttgagcatcttttcatgtgtcatgtttgactatgtatgtcttttttggtaaagtgcctattcacatcttttatacattgctttttaaattcgagttgtttgtcttactgggttgtaagagttttttctaaatacaagccctttatacaggtaaatgttttgcacagtttttacctggctgtggcttgccttttcattttcttaacattgtcttttgaagagcagacatttttaattttgataaggtcaaatttatccatttttttgtgtgttttagactttttatgccctagtgaagaaatccttgcctattccaaggtcacaaagatgctccctcaaaacttcttctaaagttttgtagttttgcatttaacatttagatctgtagtctatctcacgttaattttcatgtgtatcatgagatatggttggcattcttttttttttttttttttttttttttggtatgggtatccaatgtttcagcaccattttttgtttgtttctttcttcgtttctagagacagggtcttgcactgtctcccatgctggagtgcaatggcgagatcatggctcaatgcagcctgaaactcctgggcttaggaaatcctccaaccccagcctcccgagtaactgggactacaggcacatgccaccatgccctaattcttaaatttcttgtaaagacaaggtctcactatgttgcccagattggttttgaattccagggctcaagcactcctcctatcgtggcctcccaaagtgttgggattacagacgtgagccaccgtgcccagcccccaacaccattattgctttaaatatttcctccatctcttgccctttttcctttctttctgtgattccattcaaatgtaaattaagtcacttgaagttgtcccatatgtcgctgatgctcattctttttttttaatctgttttacttttgatagcttcaacttttgtgactctaaattcacaaactttttcttttgcagcgtataacgtactactgttctcttttaaaaagaatgatacagggtctcactgtgttgcccaggtggccttgaactcctaggcttaagcaatcctcctcccttggcctcccaaagtgctggaattacagatgtgagccactatgcccagcctctgctattattttcatcttgtgaattttttttaattttagatactgtattgttcatctctagaagtttcatttgtgtcctttttatatcttctatatctccctttatcatgttcagtcttcctctagattcttgaccatatgtagcaggtgtacgtaactgttttcatgttctactttctaatttcattattgctgtcattttaggatatttttaaattttttttctcctggttatgggttatattttcccacttctttgcgtgcttataattttttattagatgccagacaatgttaattttatgttgtcaggtattggattttgttttattctttaaagtgttggactttgttttagcacacagttgagttacttaggattggttggattcttccaagacttgcttttaagcttagttctggtgggttcaatccaaagaggagcctttagtttagggcaaatgtagctcctctaacaggatccttctgaggtcctacatgatgtcccatgtgttacaaggtctctactctgggtgagagaacacataactattgtgagcctacatgagttccaggaattgtccagctcactgctttcttgcagttctgcagttctttttctagcctttcagagtttcaccccttgcatgtgcaaatcagtattcagctgaaagattcacagggtcccttggtctacagatctccagagctctctcactatacagatttgttctctccggtattgtgccccacaaattccagctgcctgagtcttcccaaactctgatatctcatcgtttcaactgagccaagacctctgggctctgggttcctcctctctgtactggggcttagaagttgcctcttggcagtaagctcaggcaattgtaatgcttcccttattgtcttcttgttgagtcttgcattgctcatatccaatgattaaaaacaataatttcatacattttgttcagttttctaattgtttatggtggaaggacagttcctgcaatggttaatctttcatagacagaagcaaaaatcacttccatcaccttgtcttgaggcctcttggttcttcaactgtaaagtgggcataataccctcagaggattgggataaatgtcataaaaattgtgaatagtcacattacaagaaaaagccaacattgggagaacagcagctatcaagagataaaactgatagcaagaacaaagaaatgaatggccatcacatccagggtggaagcagctggatcctgactcccaggctcatttccattgattacctggcagaattaacctaactcctctctccatgttggggctggacttcacattaaaataggagcactcctagtacaaccagattttgttggattttgctagcagctgtatactgcaccttgcaacatcacagatgatttggtgccaggaacctcttcagtctcagactctacagaccctcaaccccaggggcattcccagaactaaattgtagcactagcaagggactgagatgggtgatcctagcctctcttactacaggtgaggcaacagaggtaagcccattatgtaaaggaatcttcccagttagcagttgactcccaagttggttttgcagtatcccatggactaagtgtggaagagaagccccaggtcctttgtgagttagagtttaaattaaacagggtcatggtggacaaatttctgattcccaatcctgttcttcggaccaattcgccgaaagaaccagaagtaggccgagcgcagtacctcacacctgtagtaccaacactttgggaggccaaggcaggtaaattgcttgagcccaggagttcaagactagcctgagcaacatggcaaaaccccatctctacagaaaatacaaaaaattagccaggcatgggggctcgtgcctgtagtcacagctccctgggactgaggctgagttgggagaatcacctcccagactcatttccattgcttcctgagcccgggaaggctgcagtgagctgcgatcataccactgcactccggcgtggtaacaagagtaagaccctgtctcaaaaaaagaaagacagagagagagagagagagaagggagggagggagggagggaagaagggagggagggatggacaggaaaggaaaggaaaggggaaaggagaaagaaaaggggaaaggaaaccagaagtagtgtatgcttagaaataactatgtttgtgtctttgggttgtcatgtgtttatccacagtagttctggacttcctccctgtgttgggcaaaggctgagatgggatggtgggtggaggcaatagtaaaagctgtgggtcccacccagggcctggtgagctcatctttagcctacccagatcctttgagctcttctggctctgctgtctcccaggccagaggggctgtgttttgattttatgggctgccaggatagtctttagagtatcctcagaagcacatcctccttcctcagcagccgatcgggaatcctacacttgaaaaatacatgcctttgagagtatgctgggacaaggaaaagtaggaatgttttccaaggggtgtgtgtgatgggggccacacctgtgtaagcagagatgatggggttcagagaaccagaaacaaaccaaggcaagaaataaacaaccagtactagttcagggtgagacaaagttagtttccaaatccctccaccaggtcattcaacatgtttgtaactggaggggcccctggggtcaggattacagtttactgggagggtcaaggattaaatagaagagtggaatttccctttgataaggagaagccaagatttattaagtcagtttattctgttgttattgttgttgttgttcctatggtttccttttctctacaaatataatttttttaacggagaaattgcataacaggacattgacgttaagagtgtacaaattatcatctgtgattatttttagaaccagtttatccaccatttcagataaaaacttttgttggatctgattacagagctctgaccaatgctacaattctttaaaatagaaaaagcaggctgtctccctatgcattgaaagtgaagtctaggccgggcacagtggctcatgcctgtaatcccagcactttgggaggccgaggtgggtggatcacctgaggtcaggagttcaagaccagcctggccaacatggcaaaaccctgtctctactaaaaatacaaaaattagccaggcttgatggctggcgcctgtaatcccagctactcgggaggctgaggcagcagaaccacttgaacccgaaaggcggaggttgcggtgagccgagattgcaccactgcactccagcctgggcaacagagtgagactccatcacaaaaaaaaaaaaaaaatgaagtctgctctgtattttttcgtctcctacttttttaaggaggttggagatactgggagagaaaggggagaatagagaaaactttagaacagttatgtctgcaaaggagaaattcacttatttgttcattcattcctttgaggcagagggaagaacatgtgcaagtgcagacagaatgaggagccttctgagactcagatgaccttccacggtggcacgaccagtatcactgccatttgcacttataagtgacattttgtagtagtgaaaccatttttttgttgttgttgggttggtcttttcagtcctgaggaggatccttctgccttcatggatactgactgctgcttctaaatagaacaagttgtgtgtgattaccggggctttgcctcccccatagtcatctttgctgggaccgagaaaatgttgtcactctgggccttgcattttttctttcttgccctttttattttggcacaagacaatcaggctgtcttgatgagtgacgtaagagtgaaggccaggaactgtataatatgcaggagctctctgagcactagatgaaggggttgacttatgatgaagggccatggtgtacaaaaacaaataccattaaacactagaattacacacattcagcatggcaagatgtttacactgtggaaagcatggatgatgtcagatggtctgaggtggaggccttgaaagtgcggtccctgccccagcagcatcagcattacctgggaatttgttaggaaatgtaacttttggggagccctgctcagacttactgaaattagaaacttggggtgagcagctaaagtttgagaaccgccggtctgaggtaacagtacagcaaccctacatgggacattgaccactgattggaatgccaggggaaactgccctctctaattattattcctcccccacccccggccccacctaaagttaaattcacctaaattaaatgctgttatgatgtaacttcactgtatccataattatgtggtaatgatattaccatttttttttcagaatgcccttgttaaagctatttagattaacatgcatcttttaaaaattatattgattttttttttaatttaacaaacctatatgagtagctcagaagagcaaaggtgaatggcccacaggccttcccttttgggttatgcttctcctctagagaggagagagactgccctaaataatagaacaggacatgctaagtatgatgccatccctgctcaaggtctgtgctactgttaaatcctctttcagcagcctgtcaaaattagcactctcccttggttagttagggagtggcagttttgatatctaaagttaactttcacaatgactgttcatgttgcagacattacactggaatctccaacctaccaaagaaccaaacactgctaagataacacatctgatattaccaaaggaattgtgtgaatgggccaccatactcctttatgcaaaacactcctcagtgccatgaaggactctgcaaagttccttcagtttcttcctgagaatagaggttcctaatagttatgccatccaaacagactagcctcaagaagcttttatcaacttctccaaagctgtaattcactagtgctgctccctggtgatttcaccagcccatggcacaaggaagctatagcaaaatgatactatagcaaatttgtcttttttttttagttttttttagtttcttagtttttagtttttagagatagggtctcactatgttgcccaggctgaagtgcaatggctagtcacaggtgtgcttatagcacactgtagcttcaaactcctgggctcaagcaatcctcctgcctcagcctcccagctagctggaactacaggtgcacgccacgatacctggctacatctttttcttaaaaacaaatttctttaaattatcttttatgatgacactatgattttttcccttttggggcataagagactttctttcatgaagtgataatagatagtaggtttttaacatcctttgcaaaataaaaagctggcaacttacaccagtctgccacattgtgacatttcattaggaattacttctccaggaaaccaggacatagcacagtaggaggtattgtccttccatgtgaatccagccattcagccattcccttgaaggccagaaatttacttgctccaaagagtgaaaaaaaaaaaaaaagttaattccaaaaatgaaatcaaattggatgcaagaatcagtcacacatacttgagtggctgagttgactgcactggtgggaaagtacaaagactttccaaacaaggagggctgaaaaaagctccagccaggaagagttagaaaaaaatcactctaacttaggaaaagtacgatggggccattaaagcagggacttgattctttcactcaaacatttgggctttccaacaaagaagaaacccaaatctatcaaagttgaggttgcaagtagaaaaggtaaggtttcagatgggtgtggtggcatgcacctatagtcccaggtactcaggaggcagatgtgggaggatcacttgagcctaggagttcaagatcagcttgtgataaaccatctcttttcctttgtaaaaaaaaaaggcaaagaaggtttaaaaattacagtctgctaaagaagaaggctgctaaacttcagactggatcaaacttcagttatttgtgtcctgcaaacgaagggcactcatagaaatgaaaataagtaccacgtgttcatctagactctttatggcaggacacaaacgttgttgcaccagggaaaaatcccgattgtgaaaaccctttgacgaactctacctgcagtgggaaacagactgtaccactaaaacagtagccgtcaatccctgctgtacctaggtcactttaaaactagactgctaggtttcaccccagagatgtggtcaagtgtcccctgacatgagtatttttctaaagctctcagattaatgtaatgtgctttctgggctgagaaccactgtgcaagagaaaagcagcatttctttgttagctgctgcagtagcttatgctgaggtattggacattcctgcctccaaccttctgttccacctagagaccctctcactctgggtactgagatggaataggggaatatggttcctgtggtccccacccagttggagctccatgagagcaaagccaggtctaattcactgctgcatctagacctagaacagaacctgcacacaacgagccagtgtttacattgctgaaggtctggccaggtggctggcctgcctgccaggaacattcatagtgcgtattcgttcttttgaattcttggttattttctctcctttggtgtttttatttgaaagagaaattggggcatggtgaattttctagttcttcactactgtgaagtcctgcgctggaatcatacgtgctctgcgtgaaactccagtgccctacccacccataaaccctgccaacccgcgtgaaagttggccctgaggagtgtggttctcagctggggtgcagagcagaattacctgccagttcttaagattacagctgtctgcgcccaacttgaaaccaactgaatcagaatctacaagagtgggattcaggcatgtgtggttttaatatcattagtcattacctttacttgagggcagtggtttttaaaatacctggatcagcagcagcagcttcacctgtgagcttgttgaaaatgcaaatcatcagccccatcccaggacctgcagaatcagaaactctggggtgaggtcgaggcagcagtccgtggtttcacaagcccttcggggcatctccttgagtccgagttgctgcacaaacagaatattttttccaagcagcagtttggagaaagtgcctaaatgaatgtcacttgataatttcctcccttttggctctaggtctaacctctcttgctgctcctctgttgacacattaattcagcaaacttatttaaaggtctctctgtgtctgttctctcctaactctccctgacacgtttgccctttcctctcctctcccagcaaggttcctgtgcagcctcagggcccaccttaaattgtgttgcctcttgaaagccctttttccatttcttccagtagaatatcagtgccatcgcattcattttggtctttcatatggctttagtgtgtattctctttacctaccttttccttagtgaccttgagcaagtaacttcacctctctgtttcctcatctgtaaaatgggaataataataataatagagcctacctcattaaagagttaaatcttgtctaggtgctcagaataatatcaacaagtgtcaattctaaaagtaatttttgttctggcacggtggctcacgcctgtaatcccaacactttgggaggctgaggcaggagaattgcttgaacccgggaggcggaggttgcagtgagccgagatggtgccactgcactcagcctgggtgacagagactctgtctcaaaaaaataaataaaagtaatttttattcgtagcattaaatcatgggtatgtaatattttgtaattacagaatagtacatgacatgtaaatactcaacaaatgtcagctttttttttttttttttgccttgagacagagttttgctcttcttgtacaggctgtagtgcagtggcacaatctcggctcactgctacctccgcgtcacaggttcaagcagttctcctgcttcagcctccggagtagctgggattacaggcatgcaccaccacacctggctaattttttgtatttttagtagaggcggggtttcgccatgttggtcaggctggtctcaagctcctgaccttgggtgatctgcccaccttggcctcccaaagtgctgggattacaggcatgagccactgtgcccagcccaaatttcagcttttattagtaacaattttaggacactaaacattttgtgatttttataggtttttgttggtgttgttgtttttgagacagagtctcttctgttgctcaggctggagtgcagcagccctatcttggctcactgcaaactccgcctcttgggttcaagcgattctcctccctcagcctcctgagtagctgggattacaggtgcccaccatcacgcccagctaatttttgtattttttttagtagagacggggtttcaccatgttggccaggttggtctcaaactcctgacctcaggtgatctgcccgcctcggcctcccaaagtgctgggattacaggcgtgagccactgcgcccggctagatttttatagttattattgtgtacttgttctttgtcctcccattggtcttaaagctctttgaagcagatctttttctttctcagctctgcatctctgtatctcccaaagtacctaatgcagttaagcttcctttatccaaaatgcttgggaccaaacatgtttcagatttcaggtttgggttttttttttttaaatatttgcatatataatgagacatcttggggatggaacccaagtctaaacacagaattcatttatgtttcatacataccttatacacataaccggaaggtgatcttatttttcccttggggacactgaataaactgcatctgtgtgttgactgcattaggtcaggtgtggaattttccacttatggcaccatttcaacacgtaaaaagtttccgatcttagagcattttggatttcagattttcagattagagatgctcaacctgtatatgcttaggaaatacttaaagagttaatactcaagtcacaggcagtgtaggtcaagaagtcccaaaggaatgtctaccttcattacactcatcagcatgcttgctccccatctcctccttctttggggtagtgccttcattccctggcttcctggtgatatcatcccttcttaaggccccagaccagaaaaatgggtctgggtgtccaactctcaagtccagcagactatacttacactcagcctggactatatccagaacagcccagatagttcttcctgttgttaattacaattttttttttttaattttttttttattgataattcttgggtgtttctcacagagggggatttggcagggtcatgggacaacagtggagggaaggtcagcagataaacaagtgaacaaaggtctctggttttcctaggcagaggaccctgcggccttccgcagtgtttgtgtccctgattacttgagattagggagtggtgatgactcttaacgagcatgctgccttcaagcatctgtttaacaaagcacatcttgcaccgcccttaatccatttaaccctgagtggacacagcacatgtttcagagagcacagggttgggggtaaggtcacagatcaacaggatcccaaggcagaggaatttttcttagtgcagaacaaaatgaaaagtctcccatgtctacttctttctacacagacacggcaaccatccgatttctcaatcttttccccacctttcccgcctttctattccacaaagccgccattgtcatcctggcccgttctcaatgagctgttgggcacacctcccagacggggtggtggccgggcagaggggctcctcacttcccagtaggggcggccggggcggctggccgggccggggggctgaccccccccacactccctcccggacggggcggctggccgggcggggggctgacccccccacctccctcccggatggcggctggccgggcagaggggctcctcacttcccagtaggggcggccgggcagaggcgcccctcacctcccggacggggcggctggccgggcgggggggctgatccccccccacctccctcccggacggggcggctggccgggcggggggccgacccccccacctccctcccggacggggcggctggccgggcggggggccgacccccccacctccctcccggacggggtggctggccgggctgaggggctcctcacttcccagtaggggtggctgggcagaggcgcccctcacctcccggacgggggggctggccgggcggggggctgacccccccacctccctcccggacggcacggctggccaggcggggggctgacccccccacctccctcccggacggcacggctggccgggcgggggggctgaccgcccacctccctcccggatggggcggctggccgggcggggggctgacccccccccacctccctcccggacggggtggctgccgggcggagacgctcctcacttcccagatggggtggctgccgggcagagaggctcctcacttctcagacggggcagctgccgggcggaggggctcctcacttctcagacggggtggttgccaggcagagggtctcctcacttctcagacggggtggccgggcagagacgctcctcacctcccagacggggtctcggccgggcagaggcgctcctcacatcccagatggggcggcggggcagaggcgctccccacatctcagacgatgggcggccgggcagagacgctcctcacttcctagatgtgatggcggctgggaagaggcgctcctcacttcctagatgggatggcggccgggcggagacgctcctcactttccagactgggcagccaggcagaggggctcctcacatcccagacgatgggcggccaggcagagacactcctcacttcccagacggggtggcggccgggcagaggctgcaatctcggcactttgggaggccaaggcaggcggctgctccttgccctcgggccccgcggggcccgtccgctcctccagccgctgcctcccgggcggccgttaattacaattttaagagcagatttctgagccatatttctgactgtgccaaataaatgaaattccttttgaatgtaatgctgtcctctagcagcagtgggtaggaaggatagggaaatggtacctggagatgatagtactgtgctcttattattattagattgttatgagattcggtttttagacattgaaacagagatgacacagaggttgaagatcccagctgcccagggtttcccccactgctttataaagatactgcctggctgggctcagtggctcccacctgtaatcccagcactttgggaggccgaggcgggcagatcacctgaggtcaggagtttgagaccagcctgggcaacatggtgaaaccctgtctctactaaaaatacaaaaattagctgggtgtggtggcgtgtgcctgtatttccagctactctggaggctgagacaggagaattacttgtaccggggaggcgaaggttgcagtgagccaatattgtgccactgcactccagcctgggtgaccgagggagattctgtctccaaaaaaataaaaaaataaaaagatgcctcctggtgagctgggaattctgcagtgtctgagttaagagtagcggtatggccgggcacggtggctcacgctgtaatcccagcactttgggaggctgaggcgagcagatcacgaggtcaggagttcgaaaccagcctgtccagcatggcaaaaccctgtctctactaaatatacaaaaattagccaggcgtggtggcatgctcctgtaatcccagctactcaggaggctgaggcaggagaatcacttgaaccctggaggtggaggttgcagtgagccgagatcgcaccactgcactcctgcctgggcgacagagcgagactccatctcaaaaaaaaaaaaaaaaaaacagtagaggtttgtctgcagccccagatggtggcctccctggggtcccatcatgttggagcccaagtccagtccccattttgccccctgtgacagactttgaaacaatttgatgtgttacataaatactctatatttttaaatctcgaattattgcaagtctatgcaaattttcaatttcaaataaatttttctgttacctgaatgttttacatatgcattatgtttatgttagttttctagaagtcagcagagttctctgagttataatgagatgataaatataaacggtgttttattagctataaatgcgtatcacttaaatgctgtctggtaagccaatccaggataaacttgttaacatcttgggtacagttgtcaggatttatcagagaatgctatgaatataatatctaaattttggcaaggcatttggtgaagtctgtcataagttcttgtagataaaacttcatggacagaatgatacaattaagaggattcataagtgggggatgactcaaaccgaagagggctagttaatgaattagtgagagcctggaagagcgtttgaggcaagggccagcagggagcctgctcaccaaaggcctccaccctccagcttgcccacatttttagtaattatttgattttgggcatttaggcattcctgtgaaattgaagtttgccaactactttgtatgcgtttttgagatagggtctcactttgtcgcccaggctggaatgcagtgtcagcatcctggctcactgcatcctcaacctcctgggctcaagtgatcccccacccagctgactttttattttttgtagaaatagattttcacagtgttgtccaggctggtctcaaactcctgggctcaagcagtcctcccaccttgggctcccaaaatgttgggattacaggcatgagccaccacgcccagctggtttacccaatttctattagatgatgaacatgtgtgaagaactgggtgctgggaggtacccgagactcctaccctagtccgcaccctcattccctagtcctgccagttttatcccttcagtgtttttttttctttcttttttgcctttttaaatgatcaccttggcttcagaccttcagcgtttcttaaacccaccttctcctgattccttctgaacttaaggccctcgtcatttatttctctcctggactacggtgcagtagtgttgtaactggtctccctgcctctaatattgcctcctcaacgataagagcacttcagtgaaaatgggcccctgaccttactgcttaaaataaccccccagtggcattccgttgcatacagaactagctgcttcacattgtctaggaggctttctgtactctagccacatttcttccctagcctcatctcctgccctttcccacctcaaattttatgctccagtgttatgggatggcctgtagttccccacatggtccgttctgtttcatgcctttgttgagcctttgctcagctggttcccctgcctttggtggtgctaacacattgtcacctgtcttcctctttgaggcctaggttatcatttgtaccactatattggaattatgtgttcatgcatttctctttctcaaactagactgactataaactccttaagggcagtgatcttatttagctcctagcacatagtaagcaggcaataagtttttggtttttttatttttttaatcagaactgagaatatgaaaagatctcggcaaatgaaaggtagaccataaaacttaacaggaggataaaatttaacagggatatacttgggcttaaaataaacaaagaaaacacatcttggcttaagtactgagtacaaagtgggagaaagatgactcaccaccatcagtagaccacgtcaaaaaagaagggctgtggtttcagttgactttgtgctccatatgagtcaacagtgtgatgcaactccagttcagaacagagaaagtaatagtcctgcgggtcaaaccatgcaggagatttgtgatccagcctattggccatcctttaagagagggtgaggcatgtccacaggaaagcagctagaataatgagagacagtgaccccatcatttgaggaaggaagtaggaatgtttcatctggagaagacagaggggacacaagaattgtaatcaaatgtctaaagagctgtcattgggagcctcaaaatgtagcattaggccagtgagtagaaacacaaaaagaactttttgacaattagatctactaacaatggaataagctgtctcatgagctccagggtactgtagggttcaaccaagagcttctgggaaagggtgttacagaggggagcttcacccctgaaggaagtttatactagatgtcctcttctcatggtcagctttgaggctcggtgataagaggtcactgagttcgtatttattgaatgttgaggaggggtgccaggaacgcattttctaatagtaatgcctttgtgcccctgttggaaaaattatacattacctaaatggaaattgttgtggactagaagtctgaaccttagagggccactcacttatgacagtgtttgaaatctgcttatgggagacatctgatggcctcacgcagtggattcagtcttcattctttcatgtccttttgtggaaatttaaagtgattatctctttcccttttgctttttttgcttcttagttctggagagtcttggcttctgggaggaagtcagagggattatctcaggatcagagctgataacgggattcccttgggccttcaaggtgccaggcctgccccagtacctccagagcctcaccagactagccattgctgcagtgtgggccgcggcagccaagagtggagagcgggagacgaatgtccccatctctttctctcagctgttagaatctgccttccctgaagtgcgctcactaacactggaagccctcttggaaaagttcttagcagcagcctctggacttggagagaagggcgtgccacccttgctgtgcaacatgggagagaagttcttattgttggccatgaaggaaaatcacccagaatgcttctgcaaggtaaagtctccaacgtactgactggccctttacactccccacattcttttgtgagccactggaatggtaggatcatgaaggcaagattgggtttaggctctccaggggcaataggaagtagattcggcagccagtggataaggactctctttttatggtggttggcatggcgtcatacctggtagggcaccaagaaaagcttttgatgataggagtattgatggcagagattaaccaaagacagagcaaaccactttgggatgtttaggaaacagatcattaaaaattcactgtagagtgtgtcagaggtagtctttgctgacatggctatttcagggcagttggccacctgggaagcataatcaaaaggaaagggcactggcctaaaatcagggcatctggctcccatcccaagtcactagaggccctctggttagtcattgcatcactctgcctcagtctcccaaaggtattatgggggaaataagaagtcagtgggagccttttgaaaggtagacctcttgttgatacaattgattatcatgtaacatctagagacatctccctgagtatttatttctcttttttgtgtgcggatttggcttacacagatactgaaaattctccactgcatggaccctggtgagtggcttccccagacggagcactgtgtccatctgaccccaaaggagttcttgatctggacgatggatattgcttccaatgaaaggtttgcccccaaaacctcctgtgcaaccttggtaagatgtatggtcccatcagtcattatgtaatgaacttgcacacaatcctgccctcaggtctcaggtcctgtatttcattctaaacctcagcctaagagttctaaactcaagcaatagaatgatgtcagtgatttgcattaataaccaaaaggtaattgcttccggaggcatttttgtaaccaggaggtagagattttcagtattcacctctgcatggattacagactatctgcaaaaaccggtgtatgaaatatgtctgattgtaattttgtgttgtttttttgtttgtttatttttctagatctgaaattcagagtgtagctctgagacttgcttccaaagtcatttcccaccacatgcagacatgtgtggaggtaaggctggttctgatcttgttccgggacctaggattttttgttctcatttactcagaagatgtcagtaaaagtgaacagtcttagcaggcagaacccctgtgatatgtgtatgtaacatctacagaaatattgttcgtgctggtttttcaattcgagtataacttcaaaagacttctttggacaccacctttcttttctcttgttttaggattttttttttttttttttttttttttttgagatggagttttgctcttgttgcccaggctggagtgcagtggcacgatctcggctcactgctacctttgcctcccaggttcaagcgattcttctccagcctcagcctcctgagtagctgggattacaggcttgtgccagcacgcccggctaattttttgtatttttagtagaggcggggtttcaccatgttgtccaggctggtctcgaactcctgacctcaggtgatccacccgcctcggcctcccaaagtgctgagattacagatgtgggccactgcgcccagcctgttttaggcatttttttaattagagttcaaagggataacagaaccttccccccaaaacacatatgcccaaaccccttgttttttccccatttctctagctggactctttatttaaagaggagtaagcatgtcaattccaaaagtatttaggattgcaacctagtgaactaagtatgcaaatacatcgctaaggcttaaatattcccccagaacatggcccagctggctctggatggaggcccagatgcgccccacctgttttacatgtcctttggtagtgaaatagaaccgaagtaagaaaaacagcttcctgggaagatgtcttaagacaaatacatgctacttaggtgcatacaagatagcaccctcacagaatcacaagtagaaggcagccaataccacaggaaaattacctgaagatccagattccacacagccacactgatggtggtggcataacattgtggaccctgagcccttacaataaacctagcactgctgtgtaggtactgaagatacagagatgaacagagactagagctatagtctaatgagagaaagttagataattacattaaatgctctagtaacaaggtgtgccagggccgtgggaacccagaggagggagtgagagttcagaggctgaagaagacttcatagaggagatcatgaagttcagagagcatgaggctgggcagagataaaaccaagggtaagaattaacaagcaggtccaatttccttagatctgtcactcaaaggcaagccagggagccaaacgtaggaggtcactaggagctaaaaaagcccccagaaaagtcaggtggggtggagggagtataggaatggagatgatttgctaaaaactatagcccaggaaggggaaaaaaaaaaacggccagacatggtggttcacacctgtaatcccagcactttaggaggtcaaggcaggcagatcacctaaggtcaggaatttgagactagcctgaccaacagtgaaactccatctctaccaagaaatacaaaaattagacgggtgtggtggtgggcgcctgtaatcccagctactcgggaggctgaggcagaattgcttgaacccaggaggcagagattgcagtgatctgagatcatgccactgcactccagcctgagcaacagagcaagaccctgtctcaaaaaaaaaaaaaaaaacaaaaacaaaaaaaaaacaccagggccgggcacggtagctcacacctgtaatcctagcactttgggaggctgaggcgggcggatcaccttgaggtcaggagtttgagaccaacctggccaacatggcaaaaccccagctctactaaaaattataaaaattagccagatgtggtggtatgcgcccgtaatcccagctgctcaggaagctgaggcaggaggatcgcttgaacccaggaggtggaggctgcagtgagccgagattgtctcactgtactccagcctgggcaacagagcaagactccatctcaaaaaaagcaaacaaacaaacaaacaaaaaaacaccaagttctaagaagtcaccaggcagcctaacaagcctgccaaggcattattcttatctaaagctgtttttaaccagttgttatgtccactacatgaataaagtgatatttaatgaaaattgggagttttccagggagaaaaaaattaacagaactggagagaaataaataaaagacgctcctggggaaacatgagtttcttggtgcgttgggaattagcatcttcctcaaggtctaaaatactcatcatgttagttgcgtagatgcccatagatgatcaaaggaatcattagttacattttgaacatttaaagaggttcagttgatagaagtaaagtacatctggaacaacagtccctgttctagaaaaagtgaaagaacggagtttaaatgatgaaaacaatccagatgtttatcaactgatgaatgagtaagcaaaatgtaatgtatccatacaatggaatattatttggccacaaaattgagtgaagtacagatacatcctacggcatgggtgaaccttgaaaacattatgctaagtaaaagaacctagtcataaaagactacatattatctgattccatttataggaaatttccacttaaaggaaatgtccagaattggcaaactgatagagacagaaagtagattagtgcttagtcagggctggggagatgggaggatagggaagtgatagataaagggtgcagagtttctctttgtgatgatgaaaatgttctgaaattgaccgtggtggtgattgcacatatctgtgaatataccagagttcactgcattggccactttaaatgagtgaattctatggtatgtaaactgtatctcagtaaaactgttactattaaaaacaaggagctgaaggttgagttgatcaccgatgtccaatgatttaaatcaatcatgctgttgcaatgaagcttccttaaaaaccctgaagaatgaaaagttcagagagcttctgggtggtgaacaagatgtactcatgtgccaggagagtggcacaccccaaagctccatagggagaggaagtcctgtgcttgggatccttctggacctctccctgtgtatctgtcttttcatctgtctcttcatctagattctcatctttgtaataaactgagaatctagttttctaaaaaataaaaacaacactgctttgtttaaacaatagtgttagatgctgctttatttatttatttagagatggagtctcattctgtctcccaggctggagtgcagtggcatgatcttggctcactgcagcctccgccccctggcttcaagcagttcccatgcctcagcctcctgagtagctgggattacaggcacgcgccaccatgtccagctaatttttgtgtattagtagagacagggtttcaccatgttggcctggctggtcctgaacgcctgacctcaggtgatccacctgccttggcctcccaaagtgctgggattatagccgtgagccactgtgcccggcctgtgattctgttttaaatgttgtaatagaaacataaatactgtggcttaaatcagatagaaacagtccaaagccaatgtatcttgacagtgttgagtcaccaggttctcatactttgttgttctgctgtcctaaacacatagtttctatcttagggtcccacctgtttgctccagcttccaccatcttgtccttgtttagccagcaggaaggggaaacccaagaaataaagatcatgggcatttcctaaggcatgacttgaaagtgcacagatactacttctagtgtcatcccagtcttcagaacttaatcacctgttactcccaaaagcaagagagactgggacatgtagtctctagctgggtgcccatgggcccagccaagaatctggggttcttttactataggaggggcatctggttattggtgacaataagttgttatttgctggacagtctttccccacaagtttggtctttaccagaccaaatgtatgccagtgttctcataacctgatttgcatccaaaaagactaaaggaaggccgggagcagtggctcatgtctgtaatgccagcactttgggaggccgaggcaagttgatcacttgaggccaggagtttgagaccagcctgaccaacatggcgaaaccctgtctaattttgctaaatacaaaaattagccaggtgtggtggcacacacctgtactttcagctactcggaaggctgaagcaagagaatcactttaacccaggaggcagaggttgcagtgagccaagatcgcaccattgcactccagcctgggcaacagagcaagaccttgcctcaaaccaaaaaaaaagactaaaggaacttgttgtctagtcatagtgactccatcttaccgaaagacaagtcagattttcttccttgggcatatttctctctagttggaatcgaaaagcaactaaaaaacaactttcttcccattgagctaagagctaatctacaggcccagtttggtgtaggtcacccctaattctgtgtcagcccttgttgcatcttctgaactactgataggtacattttgtgcttttagaacagggaattgatagctgctgagctgaagcagtgggttcagctggtcatcttgtcatgtgaagaccatcttcctacagagtctaggctggccgtcgttgaagtcctcaccagtactacaccacttttcctcaccaacccccatcctattcttggtaagtgcgccgagacggaagtctgttgtaccaaactcacttaaaatatgaatagatattcttgcctaaaaaaagggaaggtgaaagatggcaacatgacacctgcctttatgtctttcagttatattcctaccgtcttagttcatgctctaatcattttcacgaacacactctttttttttgagacggagtttcactcttgtcacccaggctggagtgcagtggtacgatctcggcttagtgcaacctccacctcctggtttcaagcaatcctcctgcctcagtctcctgagtagccatcaccaaacccagctaatttttgtatttttagtagagatgagttttcaccatattggccaggctggtctcgaactcttgacctcaggtgatccacccacctcagcctcccaaagtactgggattacaggtgtgagccaccactcccagaccaccaacacactcttaaccagcctcttgtttttcagccttacccctaaacttttttctacaaagagcctctttatgaaatgcaagtctgataatttcagtccactatttaaaacctttgagtgggttcccactgctttcagtataaagcctaaacaccctttagcacggctcataaggcccttccttttctgtcccctagcccactcctcctgccttatcatccaccactccctaacacgggccctatgtgtcatcagtagggaacagttctctaaattaaacaaaccactgcttgactgacttctatttgtctttcaaaacagcctaactgtcccctcttctgggaggcctattgcaataatctaggtgagaaatgaatggatgagtgtgaagctgtggcagcaaggaagagagaacaggctcaaaagatttaggaagtagaatcaacaggacttggtggtattgaggttgatatagaggaaaattcaagaatgacttctaggcttctggctaaagtgactggataggctgctggttgcattcagtgatttttaagttgaaggtatctgtattagtctgttctcacactgctataaagaactacctgagccaggcacagtggctcacgtctgtaatcccagcacattaggaggctgaggcgggtggatcacctaaggtcgggagttcgagaccagcctgaccaacatggagaaaccctgtctctactaaaaatacaaaaattagccaggcttggtggcacatgcctgtaatcccagctattcaggagaattgcttgaacccgggaggcagaggttacggtgagccgagatcacgccattgcactccagtctgggcaaggagcaaaactccatctcaaaaaaaaaaaaaaactacctgagactgggtaatttatgaagaaaagaggtttaattgactcacagttccatagtcttaacaggaagcatggctgggaggcctcaggaaacttaacaattatggcagaaggtaaaggggaagcaaacaccttcttcacatggtggcaggagagagagagagcaggaagaagtgccacacactttaaaaccatcagatctcataagaactcactcactgtcatgagaatagcaagggggaaatctgcctacatgatccaatcacctcccaccaggccccgcctccaattcaacatgagatttgggtggggacacaagtccagatcatatcattttgccccaggcccctcctgaatctcatgtccttctcacattgcaaaatacaattatcccttctcaacagtcctccaggttcagctcatttcagcatcagctcaaaagtccacagtccaaagtcttatctgagccagggtaactcccttccacccatgagcctgtaaaatcaaaaacaagttagctacttccaagatacaatgggggtacaggtggtgggtaaatgctcccattccaaatgggagagattggccaaagcaaagggtctacgggccccatgcaagttcaaaacccagcagggcagtcattaaatcttaaagctttaaaataaattcctttgactccatgtctcacatccagggcatgctgatgcagggagtgggctcccaaaggccttgtgcagctctgcccctgtggctttacagggtacagcccttgcagctgctttcacagggtggtgttgagtgcctgcggcttttccaggcacacagtgcaagctgtcggtggacctaccattctggggtctggaggacggtggtcctcttctcgcagctccactaggtagtgccccagtgggaactctgtgtgagggctctaaccccacatttccccgtctatattgccctaatagaggttctccatgagggccccactcctgcagcagacttctgcctggacatctgggtgttttcatcatccctctgaactttaggcagaggttcccaaacctcaactcttgccttttgcacacccacaggcccaacaccacatgaaagccaccaaggcttggggcttgcaccctctgaagcaatggcccgagctgtaccttggccccttttagtcacagctggagctagagcagctgggacacagcgtgctgtgtcctgaggctgcacagagcagctgggccctgggcctggcctaagaaaccattttttcttcctaggcctcctggcctttggtgggaggggctgctgtgaaggtctctgaaatgccctggagacattttccccatcatcttggctgttaacattcggtttctctttttttttgagatggagtttcactcttgttttccaggctgcagtgcaatggcacgatcttggctcactgcaacctctacttcctgggtttgagcgattctcctgcctcagcctcctcagtagctgggattacaggtgcccaccaccatgcctggctaatttttgtacttttagtagagacagggtttcaccatgttggccaggctggtcttgaattcctgacctcaggcaatccacccatctcagcctcccaaagtgctgggattataggcatgagccactgcacctagccttggctcctctttacttatgcaaattctgcagcaggcttgaatttcttcccagaaaatgggtttttcttttgtaccacatggccaggctccatgctctgcttcactttcttttaaatgtaagttccagtttcagataatctctttgttcatgcatatgagtgtatacttttagaaacagccaggtcacatcttgaatgctttgctgcttacaaattttttctgccggataccctcagtcatctctctcaagttcaaagttccacagatctctagggcaggggcaaaatgccaccaatctctttgctaaagcagagcaagagtgaccttacttcagttcccaataagttcctcatctgcatctgagagcacctcagtctggacttcattgcccatatcactgtcagcattttgatcaaaaccattcaacaagtctataggaagttccaaactttcccacatcttcctgtctttttctgagccctccaaactgtttcaacctctgcccattacccggttccaaagttgcttccacattttcaggtggaaatgtctttatagcagtgctccacttccagtaccaattttctgtattggtccattctcacactcctatatagaactatctgagactgggtaattcatcaagaaaagaggtttaattggctcacagttccatgggcttaacaggaagcatggctgggaggccttaggaaacttacaatcatggcagaaggcaaaggggaagcaaggcacagcttcccatggcagagcaggagagtcagagagcagggagaagtgccacacacttttaaaccatcagatcttgtgagaattcactcactatcatgagaacagcaaggaggaaatctgccttcaggattcactcacctcccaccatccactccaattcaacatgagatttgtgaatccaaaccatattagtatctttgggacgtaaaggtggagatattttgaaattaaatggatgtacagatcttatctggtttccagcatgttgtacacgtccatgtctctcctcactgctactccgtgtgtcaagagtaataggaaagggcagcatgtcaatgatgtataagaaaaccaagcttgagaatatcctaaggaattgaaaagcatagttctttttttaaaattttttaaattgtgtcattttgttttttgttttgcttttaagcatagggtttaataaaaggaaaccccaggttctacagctgtgcttcaaccccaaccctgccctctcctgccatgtttaatcccgtattaacatgctatgattctcttctcacctattagtagaattatatttttgtgtacctcttccatgcccagccctcaagaatcagacatggtcactgcctccaaggagctttcagtatagttgtggagaaaggatttatagaataaaggaaggaattgttttttagatagtgagatccaaattttaaatgttgtaggagttcagaccaataaagggtctcctgtccctgtatctctctgggagacaacgttttcttcaatatggttttaacttttttcttcttagtgacttcaggcatttttcttacagccagagagacattgagaagggaccttctgtgagtgtgatttaatcatgagacccgaaggaataagagcaaagggtgacaaaccttagtcaagcttctccagtaaagttaataccattttgcagcacattttctgggtgactttaactactcaaaccctagcttataacaggtaaaatgtgtgtggaataacctggaattcttttgtgaaatttggtcctgtgcctacaagaacatgagaaataggtgcagtgactcatgcctataatcctagcactttgggaggacgaggcaggaagatcacttgaccccaggagttcgagaccagcttgggcaacacagcaagatcttttgtctacaaataataaaaaaattagccagatgtggtggtgtacacctgtagttccagctactcaggaggctaaggcaggagaattccttgaacctgggaggtcgagcctgcagtgtgagccattgtgccactgcactccagcctgagcaacatagtgagaccccatctcaatgaaaaaggtactgaataggtagaagcaaaggacataaaagtgcatgagaggccaggcgtggtggctcatgcctgtaatcccagcactttgggaggctgaggagggtgggtctacctgaggtcaggagtttgagcctgaccaacatggtgaaaacctgtccctactaaaaatacaaaattagccgggtgtggtggtgcatacctataatcccagctacccgggaggctcaggcaggagaatcacttgaacctgggaggtggaggttgcggtgagccaagattgccccattgcactccagcctgggcaacaagagtgaaacttcatctcaaaaaaaaaaaaaaaaaagaagtacatgagaaaagtcaagggcacagcaaagtcatttaaggaaaaagaaaaattgaaatggactaaagagggaaggatctgaaggatataaatgatgaccatattaaagaggaaaatattaagaaaggaaggtattgaacccttacagaacaactagaaagaatggagactgaaaggctgagtaaaatttaaatcagatctgtaatgaaaagaagagaacgaaaccccaaatggagccactgttattattggtatgactaaagcatcagtgactctgaaaccaggttctccatgtacagatgaggtagaggatagacaaaggggagttcttagggaagggtagtttctccattgaaaggatggggatgctgcgtggtggtcttccatggccctccagtgataaccctccacaagcccaggcccaccccacctggactagaggtacccctttctgggaggccatgctcacctctcactttcgtcatgaattctgtgtcagttacagcagtccactctcatctttcctgttgggaatcacagccacacaattttgttcttcacaactcattgctttgtgtttttgactttatattccttttgattgctcaggacaagatactatcttttattattcattgtccgcagcagcacctagcacaggctgactagacagatcagtgtccaggagtaatggcagtcagatagtggaccccctacatacatgggacacaagctgctgcctttatcatgggtctcttttttttgttgttgttgttgttttgttttttgtttttttggtcgggagcgaggatggagtctcactctgtcgccaggctagagtgcagtggcacgatctcagttcactgcaacctctgcctctcaggttcaagcgattctcccatctcagcctcccaagtagctgggaatacaggcgcccgtcaccacgcccagctaatttttgtatttttagtagagacggggtttcaccatatgggtcaggatggtctcaatctcctgacctcgtgatccactctcctcgtcctcccaaagtgctgggattacaggcatgagccaccacacctagcctctctttttttattcttgcccccagagcataatcttgattgatgcttcactttcagaatttataggctcagacacttgaatcaacactgggctagtttctccaaagcagtcttatgcataaagttttcttctagagaatcaggactcaactaggagagcagggcagagggtctttgtcacctgggcagcatcttctggaggccttgcctagcgctggttgcctccggaaagcctacatcctcacccccaaaaaaggcatttccaaatctgctcccttaggagtctgtctttgccaatgtttgtctaacactctttctatcttaacaatacccagaaaaaaagagatagctgtaactcattcaatgctcctctcttccaccagggatttgaagcagtatttgcacctgcctgttaattgcattctaggtaattcagattccttttggtcttcttagagttgcaggatacacttgctctctggaagtgtgtccttacccttctgcagagtgaggagcaagctgttagagatgcagccacggaaaccgtgacaactgccatgtcacaagaaaatacctgccagtcaacaggtacctcgttcttatccttttgcattgtcttatcgctgcaggatagaggttggaacacttttctataatgagccagatagtatcttaggcattgttggtcatttggtctgtgtctcaactctgccatcttagtgggaaagccacaaacagtaggtaaacaaatgggcatgactgtgttccaataaaactttgcttacaaaaataggcagcttctcagatttgatctactagccgtagtttgctgacccctgctgtaggacatcctaaagaaaaattatttttaaaggtagaaatttaataaactgttaggtcttttgctggttacgttgtcatcggttttaaataatgccaagtctctattatctgtgtggttccataactcaggaatcacaaaaccatcattttgttcctgagtttttatatgtgacagaaagcgagaaatgattatgtgtacgttaagtttctctactttgtgtcctagctgctcatttgataataacatgaacccaggagggaggaggggagtggaaagaagagcaccctagctgggtagtcctgaggtcgcagccgtcgtataagcggttacagccccaggcccggggtcatgtgcatgtaatggcaaatgctacgaaagctaaaaggaactcaggctgtgggtagaaaatgggctgctggatgaaagagatgggggcagatggagtagaaataaggtcacacctctggacaagtggccatctgggagggtgcctgctttagcagactcggattctctgtgcttggggctgggtgccaggaaaggtctctggatcagcggtcccaatgagaagcaagaacactgttttgaggcaagggatcaaagctgagcaaagaagttcaccttaatagacagcagaatgagagaaaaggaggccagataagcctttgtaattgatgcaaggcccctcatcagttactgtggctggggctgcttgccaaggcaggacacaggattgtgttccctggaagcctccccagatgtgtgaaccttccaggatctgaatcctcagtcaaaatggtctgtgtacacttctctgcctatgtggaagaagctagttttggaataatctctcagtgataccgcaccagggcaggtttcgcctagatcagcttttcctctcagcaggatagcatttggaacagagctgcaagtgatatgcaagcaggctcccctcagcccccaacctgccagacttgcccaatagctaaaattctgccattggcaatttattcatttttccaattgcagcatttgcttagaaggacacacagaaagcctagtaagtgttcggtaaatatttgttggaatataatactcagtagattccgcacccagcccagcttgattttcttaagcataaaatatagatctttttctttagactgaaaagtagctgaggactgagaatcaccctgatttttttctttaatcagaagttaggcaattgattgatcagaacaatattgtcttgttttaggccaggcgcagtaatctcacgcctgtaatctcagcactttgggaggctgagatgggtggatcacttgcggtcagaagttcaagactagcctggccaatatggtgaaaccccatctctactaaaaatagaaaaattagctgggcatggtggcgggcacccgtaatcccagctactcgggaggctgaggcagaagaatctcttgaacccaggaggcataggtcgcagtgagctgagatagtgccactgtactccagcctggatgacagagcaagacttcatctcaaaaaaaaaaaaaaaaagaacaatattgtcttgttttaccatctctcaaggatatcaagtgctggtggtaacttcacattccttcagcatataaggattttgtagaatacactgctgatgttttcctctttggtgttccaagttaattacgattgaatcttgactaccttaaaagtacacgttgtttcttttgtccccaaatcggtggttgactaaatgccacagtaaaataacattattaagttgtgttaatatttaatgtcttctttgaggagttaaaattacaatgaaaaaattaaagttacttctcagttttcctcgaagaaagaaatacaacacaagagctccacacctctgagatctcccactgtcagtgagggatggatgcagacagagctctgctctcagaccgtctcctagcagcctgctggaggagcttggggaagtaggaggtgcattctgtggggtctctctggaaagggtctggagagtggagtgggcccaaaggaagggagagatgtgacacaaatgagagcagaacagtcaatgcagaaagagaagttggagccaaagccctgagttggggagaacccgggagctgattgggcagcagtgagtggacttttgtggtcagaacacaggctcaggccaggcaaggaagaggagcaggaaatgaactgagcaaggcaggggcacttgcttgtgggatggctcagtgccaaggcccgatctccttctgcaggtaatgggaagctagagagggtttaaagcaggaatgaggtgggaaggcactcagaggagactgatgttaccggagacatacttgtggaatctctggcagcagtgtgtgtgatgggccagggctggggctgagtgaggggatttgccaggcagggaaatcagctgggggctggcagcaacagtcctctccagctgctctcagtggggttgggatggagaggagaggactgatgtatgagaatactggttgggggttgggtaatctcaacatggggactgctgctgtgggaggtgggagagaagggaaagcatgaggtgacttcagagtttcaaacctgtgaggtgtccaggggaaaataacaaggcatgcctctggcactgatgtagaagtcagactgtggcattccaggaagtgaaactaccaggaaatcgggaaaggcactcagaggccacaagtcactgtgatccaggacaaagttttccttaggtcttggagagctcaacattcgaaatggagagggcaaagggagacctttatctgctgtgggaacagaataaactgtctgggttctgtcctgccttcctcagaacgcagcacagctatcctgggatctccagtgctccttaacagatctagttatcggtccccacgggcactttctggaacctgtagaataggcaagcattaaatgcagtcattcagacttcctcaccctaacatatccttttgcataattggctttaggtctagatttgattagttaatgattctagaaggcctggagaaaataatgccatggttagccggccctcctgagaacagatttcttattcaccttttttgcctgctggaatctcctgcacatgctgcagcccacacagggaagcatgaaactcacagcctgttaacaactctctccctgcaatgtccaaagcaccctcagcccttagaagtatggacatcagggagccccagctgcaggaccctctctgcccctccctccccactctgtaccaatcatggagcctgcagaagggaatggaagaaatgacatttccaggacttaagagtaaggtattgaaatttgtagctaggagaaaaaaaatttgtgggctggactccaggcaaggctctgccttcctcctttccctgctctgacttcaggccttgaaatgctcaggaaagagctctaatgctacaagagcaggagatgctcaaggctatctctgcagctccccaccctcttccaccaagcggccactcagatctgttttatataccacatcgggcatttaatgtcagatttcatttgaacaaaggcctctgtgtgggaaaaacaacctggacaatacttaactttaaatcctggcatttgcatgattcttaagttaggcagagttctggatgagagcagcaggagaggaacccatgaaggtacaaatttgtgaagctgccttcagaggaagagaagataagaaaggtatcttagaaggttagaaagaatccagtgattggggttcttccatagcctttcctacaagccagggatacctgagccttttctttttgcagagctctttcactctgatgcaagttatctggtgtggcttagctggaaatactgcagagagttagaccgaaggactccaggatgggcttaaggatggctagatcaggaggtccccaggcagaaccacatacgttccacttagcagaggcagggtgcctctgggagctggatgggccatggggacagggcaggcagggggatggctttctggacttccctcaggcttcttgcttttcctggcactggatctccccctttcttgctctttcggcttcagccactattggccacctaatttagatggcctcctcccattcccgtctccatttgtgaggctcagaaaacagtttctggccaggtgcggtggctcacgcatctaatcccagcactttgggaggctgaggtgggcagatcacctgaggtcaggagttcaagaccagcctggccaacatggtgaaaccccatttctaataaaaatacaaaaattagctgggcatagtggtgcacatctgtagtcccagttactctggagactgaggcaggagaattgcttgaacctcggaggtggaattttcgcagtaatgcagtgagccaagatcacaccactgcactccagcctaggcaacagagtgagactccctcaaaaaaaaaaaaaaaagaaaagaaaagaaaagaaaggaaaacagtttctgcttgagttgatacaggataagagaaggcactgagcaaggaattttaaggcgtgccagatttcatgcctgttgtcagtgttttggttcaagaaggatgacttcttggtagaaactttcttatgaaagaaaatatgtaagacctttaaaggggatagtgggtaggcaagcaggcagatcggctgtggctctttttcttggaatactgtctccaagtagttctggtccctctctcctagaaggccccttgcccacaaaaagtcatgtaaaacttctgctcatccttccaaatatggacatttagcgggaatgcattaaatcccatcttctcgacagcacccttgccctccaggatctccccattccctgagccgctgcagcatttggttattgtatcatcacagagcctttgctattctacgcttttatcattttccctttcctgtgctttagttctctcttcccaactagccctcatgaacttagagactgttttctattaggtacacagtgggtgctcaatttgtgttaatggattgatttttcaccatagtcaggtggcaaaagaaacatgagagtacgctttgaaataagaaagcttcagaacaagcaggcagaccctctctgctggaaccagctcaagggacagcgtttttcactgattcataccaactagggtggcagtcttgctgactcgcacactgtccgggtctggtaggctgagtttgcagcctgtagtgttgggtccctcctcactcttacctctgaagtcagggtcttggattacaggaccagaaagccagcctggggctgcagggaccatgcccctgggttatctgggagacaccaaaggagcctcctgtgcttggcatggtgacccatagagactggaataacaatggtgtttaggagggaggtggaagaggggaagtaggagcgagatgtagaaaaatgagactcagaggttagaggagggagcagtaggcaagtggcattgtgaggttgagtccaagcagccatgtagccagggcaaggcaaagaaggaaaaaaacaacatctgcacacatgtatacatgtgtgcatcatcgtcacccacacagagcccgtgagccagcatgaaaggatgaacacttctcatatgccccgacccttgagcaaacagggagggaagcctgggaggagagagatagaaaggcctgggtcactgtgacattttccagtggccctatggagtgagacagctcagtcagcaaagccccagccctgtgggacttcacactgagtcacagatgattccactcctggaacctctaaggctgcccaccagtctcagacccgcagcaggccctgtgcttttttcagttcctgccagatcacagagtcaggcactagaagggctctgcaagtactgactgcctcccccttcctcctgccttccagtaggctctttcctaatcgactcaggtatatcgccttcaaagtgccctttctgctctgtggtgccagagcctggccccagactcaatattgtagatgtaccaagtacctttttctaaagaagaatgacccaaaaaagttaagaatcactttactagaatatatcctcctacctatctccaagcctggcctaaattcctcttcagatgagttaaacttatttgcctccatcatttctttttcttcttttttttttttttgttgttgttgttgttgttgagacagagtttcactcttggcgcccaggcgagagtgcagtggtggtgcaatctcggctcactgcaacctccgcctcccgggttcaagcgattgtcctgcctcagcctcctgagtagctgggattacagacacacaccaccatggctggcttattttggtatttttagtagagatggggctactacatgttgcccaggctggtcttgaactcctgacctcaagtaatctgcccgccttggcctcccaaaatgctgggattacaggcatgagccaccgtgcctggccatccatcatttatatgtgtctactttaaaattctaaattggggctaggcacagtggcacatacctgtaatcccagcactttcggaggccggggcagccagatcacttgagcccaggagttcaaacccagcctgggcaacatggggagaccctgtctcttcaaaaaaatttaaaaattagccaagtgtagtggtgcatgcctgtggttccagctactgaagaggctgaggtgggaggatcacttgagcccagaaggtcaaggctacaatgagccatgatcatgctactgcactccagcctaggtgacagagtgagaccttgtctcaaaaaaaaaaaaaaaaaaagcacaaaaccaaaactctaaattgttttctgaccccttctcttactcctacttaagatagtctatagatttttcttactatttaagtatgagatgagaagtggtcagatcaagggtattcaatcattcacttgttcattcattcaacaaatacttagaaagtgcctgtccgccaggcttgtttcatgtgctagtccaagccaccaccatctctccccagacttctacagcctggtcttcctgcctctatttttgttcgttgcaattcaggctcacttcttcaggagtaaaacagatgatactgctcttctgctcagaactctctcttggcttcccatcttaatctgggtaaaacccagactcctaaggcaacatataaaatcctacccagtccagcccctgccgctcctcccctagccactccagccatctttggggttttccaactccagagcccattccaacctcagggcctttgcagtagctgttccctctgcttggaatattcttcccttgtcctgcatggctgactccttcatatcattccaatctcagcttcagtgtcatctgcacagggggcctgccttgacctctcagactacagtaaccacccagttatttgctatcattcaccccactggtttaattatctgcataattttatttatttgttatttgtttctctccaccggaataaaagttccaagagaggccgggcgtggtggctcacgcctgtaatcctagcactctgggaggccgaggcaagtggatcacctgaggtcaggagttcgagaccagcctggccaacatggtgaaaccccttctctactaaaaatacaaaaattagctgggcgtggtggtgcatgcctgtaatcccagctactcgggaggctgaggcaggagaatcgcttgaacccaggaggtggaggttgcagtgagctgagattgcaccacttcactccagcctgggcaaaagaacgaaactctgtcaaaaaaaaaaaaaaaaaaaaaagttccaagagtgtaggatttttgtcttgtttgtttgctgctatattctcagaacttggcacataatagattctcaataagaatcactgtttgatgatcaattgaatgaatgaattgaggaatgtatctatcaaagtagttaaacccagtaagaagcttagtgtttttcagatctacctggtgggggagctgtttggattttatgttatgaaattgccctgaggtcacagcattttcttattatggcagattaaatcgcctgccttagtcctgacttcttcctagagacattaattcaaacagctgatgaggaactgatgaagcatctactaagactggccactgtagaaaatcctggactaactctgtgtctcccttgtcactccatactggatcatgcaggatggaatttcttgagcaagagtttcatccatagggacccacatgcctagcacagggccggccctgggaagtgcccagcaggtggatacttgtcagttgcttatcaggtcccaggtgagagaccagagccaaggctacatgaatcgatctggaaggcctaggggaggtggccccttcctcccagagccccgtctgctctttcccactctgagcaggccagtggggggacaggggaaggagaacctcatcacctccctcttgatgctcctgtttcattttatcccctttgatcctcacaacactgtgagatactttattatttcctccattttatttatatttttatgtttttaaaggtggggtctcatggcatcactctggctggagtactggtggctgttcacaggcacacttgtagctcactgcagtcttgaactcctgggctcaagggatcctcccacctcagcctcctgagtagctgggattatagggacctactatacttcctccattttaaatgtgaatatgcagaagttcagagagttgaaggaatgggcccaacgtcccaaggcagataagtgtcagagccagagttggagctccggcccctgtggtgacagaggccttgcactctcagatcctctctgagacagggaaaggagtccaaacctggcatctagtttagaacccaggagttaagagaaaggggtgcattgaaggtcttctaaactcactgttgtgtttgaaagaagacactggagtcagagtgtaagaaaatgggttggggaccagagctgagataccagagtgtgccctggggaaagggaatagagggcagatgcagcaagaggcggcaggtggtcctctgtcaaggctgctgctgttcctgttctccagtgcccctcctaaagggagggaatcccaggactcgagggttttagagcctctgacttacagatgtggaaactgaagcccaagaaaggtaaatgatttccccagtgtcacataatgagtagaaaaacgaggtctacaacacccactcctgaggcccaggacagtacctctctactgtcccccaagccttgatttatacagaggaaatgacagaaatgtagggatgccccctgagaataatccagactcgggtagagaggagctggcaggggtgagatggggtggtgtggggtaagggcagagaagatggaacactgccttgagaagagggcttggaggaactccagcaacactggggtgggaagaactaagtgttctgtgaaaccagccatctctcagcagtcagcaatcaaaccacaccctgagtcagcccgggattccactgccttggtctctctgggcctctctccgtagctggctgtgtgttcttcagtattgtcagtggggctgcaggggaggaaacagaagaggctaggaattgtggtcctaacccactgtgaaccagtggagggtgaggggaaatgcttttgaaggaagatagttatgtgggagccagttatctgttttcttatttattccttcaaaataaagagatttgatcaaggtaggcccccattcctgccagctgcagtgggtgggcacggtggagctccggttgccgcattccaagttgcgtgtgccatcagttgctgttccagagagcctgggccccctgacgttcacctgcatctcagcgagtgcgtcactggcagcggctcccatgatgtgcaaaagcaggtgcaaactaatgctcccgtcttcgatctgctggccagttatgagtgccagtgagtaccctggctgggcctggttgctggggtgatgggattgttaccatggcctcccagtgactaatccccagagagacaacaacaggctcctttcgaggaaatgagggtcatttttgcatcattttgccctgactcttgctgcttctgaaagccgagctctctggccaaggcgactgacccctgtgggtgatgataagccctcagtctgaggcttaggccatctggtgctgacgcggctgcagggtgttgtcttccctgttagtcagggcaagcctggtgcctggtgatcttccttctccagctcgtggcctcggctctcctcttctgtgctttccttttcctcaggaactttcgctttcctcagcaaggccatatcacaatgcaggatttctcttcactgtggtgagcaggcttcctttttgaacctaagccagtttcaggtgttagggtcactactctgtcaggggtggcaagatgggcccccccacctttctcgttcgtccctggttcagtgaggatgactcctccagccccagcttcaggcctgactctattgggagcatccctcctgagcaccccagccagcactggcacctgccctttgccctcctgagttcactcagccacagacttcttccatcccaacagccagatgaaggtcagacccaggctgtcatgacagtgctgcccgagaagttctgcagggcaggggtggggcccaggagaggcctcttcactggccacggtggcgacccctccctcaccatcctgctgttatccaaggaggcgtaaagggtgacatcagagacctgggaagccctcatcctacccaccaaactccaattctgttctcaaatctcccagaagatgcttggtggattgtgaaagcctgggcttccttgtttttgctgctctattttgactacagcagtccccatggcaagacctctcatgggcagaagagcagaatggagagtggctctggtggtggcgggccagtacagggagggtttttctctgcacacgtggggcagggtgtgtacattgagatagaatggcatgttgggaatctgtgcacctttcagagtgtctgtttgtaaagagtacacagccccagtttggatgtgaatgtctgtatgagcgttaggaggagaatgggattcaagagatgtgctctgacctgttcactgatgcatcatgatgagctaaaagtaagaaatccctccctgaatgtcaaaatggccaggaaatcgttgctgtatttcagtaattgggtttgtcagaagtgaatttcttgtgaggctgatctacaggagcagaggcagagaacagcaggtgggaatcaaaaacaaagaattggccttgacggcaacttgtcttctccctctctgcctcctcttcccttgttcctttccccctctcctgcttcctcacctccagctgaagtactgaagttactggagtacaaccagggctgtcagcttggggtgtatcttgaaatggactttctgaagtattttctggggtttcaagcatgaaacagctggtgttttagtcggggtatagatttggcatctgtaagagaagttaatagtggcttaaacaagtcagtagcttattttttcctcacacagagcactcagtagactagtgtgatggtccgtatgattaggggcgcacaccttctttcttggtgctctgacattttcaagacacaccatccctcacatggccccagatggcagtgccagctcccactgccatgtccacaatctggtgagccggaaggcaggagggaagggccagcctggaagtcacatgcaccacttccatggatcttatcagccaggccctcgtcatctgccacagatctcagccaaagaggctcagaaatcgtgtgttgagctaaatggacacacgcttagctaaaaagcccatttctgtgtaagggggaaagactgggttttgggagataggaacttcacttctcgcaatctgccatcttcttatttttaccaggtcctaatcactgaggttctggcaagtgccagctgcatgggcactaacatctggggacacagggatgaattagatagagcatctgcttctaaactgttgggagtccaccctctcaggtggtaggccacctaaaatcaacagaccttcctttacatgtatccaaatcattttttctgttagcaacttacatggctaattttataagaaaaggaagtaaccattaataataagaattttgttctaaacattctcactaacttggtaagtttgtttgctgatccctgtatcatctcttaggaccacacacatcacccaaaatgcagacacttcattaggaagcaagcccacaagctttgcagttgcattacccagagcaagaatttactagaaagatagctttttaattgaaggggactgggaaggaagaaaacacttagtagagaccaaaaaaaaggagcaatggcgggagggagggagccacacttagaagggagcaggaatggggaagtggagaggggaggctcaagtttggcaccctgcctgttccaccactgtgcttatgcgtggcatgtcctccttgtgccagtcaacctggttaagtgtcgcgattctacccagccccatgccctcctttcccacaaagcctttccagtctttgtgtctctccttgagtcagacccacactgtttagctcttacattgctcattctttaggagactcctcctttcacccacactaagctttttaagggctgaggcctccatcacagcagagtggatcatgttgttttttgttttttgtttttgagagggagtctcactttgtcgcccaggctggagtgcagtggcgctatcttggcttactgcaagctctgcctcccaggttcacaccattctcctgcctcagcctcccgagtagctgcaactacaggtgccagccaccacgcccggctaactttttatttttgtttttttgtttttagcagagacggggtttcaccgtgttagccaggatggtctggatctcctgaccttgtgatccgcccgcctcggcctcccaaagtgctgggatcacaggcgtgagccaccatgcccagcccggagcatgttacattctagagtggctcatgacaggcagacctattgtttctgtagcacagcctggttttggagttgaaagtggacatggggtttgagatgggcagcttcccttcagtcagtcccctgctcagcctcccggcaagctcactggccccagcgatgagcctgtagggtcaggttacactgggacaggttggtaagggctccccaggcaacccagtcccatcacaccagaaaatgaaattcccctcttttaaaagccactcatagaacatagtggtggttgtggtggttctgcttcagaccctcaagagtctgtgtgtgtgtgtgtgtgtgtgtgtgtgtgtgtgtgtgtgtgtgtgtgtgtgtgtgtgtgtttcaaaagtaaaaaaaaatcggattatcatcctcgcccccttaatctgttccaaatgagaacgcttaggaagaaaactcccaagaacccactctgttaagaaaattggtttctgctgtggagtgggtcagggtggggaatggagttaggaaaatatatggaaactgacagaagagattcggtttgtgtttggaaaaggattcgggttgttttcaagttttgagttacagcctgggcgtgtttgaagaagtggggttgtacagcatagcctctgtgggcttctcattcagctcctcctgcctgcccggcccttgttagagatgccttgcttggcaggcagactggctgggaaccttcttcataaataactccgtgggggatacaggagtgataacagacgttttaagtggaagcccagctgccttaagaacttaggaaagggcccggcacaagtctggccccaggattctcctcgctaagcaagggaacgctcttaaagctttcagtttggttactctaattttattatttctctaacctctctaatcagcagagtgattgaggctctgattgtgagtcctgtttttatttttcacactatttttatactttgaagctgtggttttaaaatatacactcaaaaatgttggctcggcacccacgaggcccaggaggttgtccagatgcactgggtctggggctgctcccagcagcctttcagtgcccccgcccccaccgctggcctttggggatagatggaatgggcaggagttgctgtaagagactggtccaaccacaggcaagcttctggccaaatattttaaattcgactctgagaaactagcaggaatcttgttctggtggcttcccaagcacacactcagggatcagaacctgcagaagcagaattcccagtttcagataaaatgttcattcatctccaatatgcagtgctggtccccatcgcccttccatccatgctgaaagtgtgtgcagcacggtacttagggaaaaacagtgccagcaaagtgggttcatttgtttctgtcaccaccatttgctggaaatggttgtcatgttcacggtactgtagaactcagagatgggtgcaagaaatcttccaaagcgctgaccttcctgtgttcttctccagctagttctaaccctgccctctatcctcttgccctcttttttcccccaggctcctcccttcccttcttttctcccaatccagagtagatctaggaatctgaaatttccaccttggctacaaacagcactgagtctctttgaacagccttgtccataaatcttagattgtttttcatctttgaaaaagttacttctggcccagcacggtggctcatgcctgtaatcccagcactttgggaggcagaggtgggcggatcacctgaggtcaggagttcgagaccagcttgaccaacatggagaaaccccgtctctactaaaaatacaaaattagccaggcgtggtagtgcatgcctgtaatcccagctactcgggaggctgaggcaggagaatcacttgaacccgagaggcggaggtttcggtgaactgagatggcgccattgccctttagcccgggcaacaagagcaaaacaccgtctcaaaaaaaaaaaaaagaaaagaaaaagagaaagctacttctatcagcaagtcattattcacatgtaggggcagggaaaagttcactacattcagacttcagtttcttttcactctatttcacaacatccactcccctgaaaccatgggctttaaaaaaaaaaatcagtccccaataggcaaggtgccccgtgacatagccagctagaaccagggaagaaggtgagagtaagggtaggtttgcctagatggaggctagctgtctcagcccatggaggaaaataatttcagtctcagggaactaaaaacccactgttcttattttagagtgatggatttggtgggtggggaaatttggggagacagggtgatatttataatgaaaggcttagctgtattgttgaggggtggggtgagaggagggagagcatgaggaaaatagctaatgcatgctgggcttaatatctaggtgatgggttaataggtgcagcaaaccaccatggcacacatttacctttgtaacaaacctgcacttcctgcacatgtaccctggaacttaaaaataaataagtattatagtgtaatatagctaacaggctagaacatacctcagttccatgttgcatcagctaaaggagagatgaaaggagggtgaatttggagcaaatagaagagaaaggaatgtggggagagagaaacagactgtcacttgaggacctggcttggtgtttctgcttctcatccttagcatgttggctctttgaccccgtgcttgtcctcatggttacaagatagcttgtatacctcggatacatcccaacattttaggtaggaaagaagggataagaacatacatttttcttctcacggggttctttttatccaggtatttaaaatgcccccccaatcacccacccacccagcatatatttctgtatgcatccttggccaggtcaggtacatggccatcccagatatgagggtaggctgaaggagaaagtatcatgcaatggagaatgagacggctctgggcatatcacttggaactggaaccatcacctcccagaacaaaattggccttctattaattagcaaggaggaagtgggatagctgttggatgggctactggggagggattagtgtatacccaggaagtgccgtgacacatttagggaactacgtgacacatttagtccagcacgaggagtgtcgagttggggtagggtgggagaaggacaaacactaaaggtagatagggaccagattttcaaaggccaaggatgccctgctgctgacttggctctctatggaagccatcacaggcgtaaggaggaaagtgggagatgattgcacattacacagaagtggggaggggacgccagtctcaagagcagtggttttcacactgcaatatgtacacagatcacctgaggatcttgtcaaaatgagattctgtttctgtgggcctaggtaaggcatgagattctacatttcgtaaaaactccccagtgatgctgacacagctgatcaggggatcatacttggagtagcaaggtcctaatgttcttcaaaaataaatgtacaaatacgtttgttagacattttatagtaactactaatataactgaaatagaaattaacactctcaaatcactaaaggaaaaaaacacgaacttagattgagttttctttttaaagaaaggcaaaatctgatgtgtcttttggtaatcctgatgtctacatgtgacagaaaagccaaacagaggtttaaacacagtggaagtttttttctctctcaagtgactgcagtccattccatatgagtgagtccagactgattggcaggccccaggccccaggccccatgcttcttctgtctttctgcttcactctcctggcatgtggcttccatcctcaaggtcacctcttcatccatgatggttgccagaagcattagctagctcatcctcataacagatgaaaagaaagggaagaaagaacaataaagagtgtgcatcctctcctttcaaggagtgcccccaaagtcccataaaacacttctctttacctctcattggctacaacctaataacatgtccatattttgctgcaagatgtgcaaagaaacataatgttttgggctaagcacattacctagagttcgcttgctaaggaagaaggaaacacatccagctctatgtcactttgataaagagataagcctaaatttacaaggaatggttgaaaataaagaaatgcacacccagcactttgagaggccgaggcgggtggatcacctgaggtcaggagttcaagaccagccttgctaacgtggcaaagccccatctctactaaaaatacaaaaaattgccaggcgcggtggctcatgcctgtaatcctagcactttgggaggccgaggcgagtggatcacctgaggccaagagttcgggaccagcctggtcaacagggtgaaaccccgtctctactaaaaatacagaaattagctgggcatggtggcatgcgcctgtaatctcagctacgtgggaggctgaagcaagagaatcgcttgaacctgggggagtggaggttgcagtgagccgagatcatgccatttcactccagcctgggcaaaaaagcaaaactccatctcaaaaaaaaaaaaaaaaatcaaaacaatagccaggcattagtggcatgcacctgtaatcccacctacttgggaggctgaggcaggagaattgcttgaaccagggaggcagaggttgcagtgagccaagatcgtgccattgcagtccagcctgggcgacagagcagcagtccagcctgggcgacagagcaagactctgtctcaaacaaaaaaaagcacaaaccaggcaacatggcgaaaccccatctctactaaaaatacaaaaattagctgggcatgatggtgcatgcctgtagtcccagctactcaggaagctgaggtgggagaattgcttgaacccaggaggtggaagttgcagtgagccgagattggaccactgcactccagcctgggtgacacagcaagacctcttctcaaaaaaaaaaaaaaaaaaaaaaaaagaaatgcacaaatttatttcaggcaattggtaacagaaagaaagcaggagtggcaataataatattaggcaaacaaatttaagacaaaaagtatgaagatggacaggaagagaagcattggataatgataaaagttatccacaaaataacaggcatgagcctttacatatcgggtaaaataacatccaaatttaccaaaaaaaacactctacaaaatattagataaaagttattaaaatacagccatagtaggatacttttcctttctcagaatgtaaaaggtcaagccaaccaaagatgaatgaggccttaaaggatttaaataccagacttaaaagtttgtataggtataaaccttgtactctgacagaaaataaacatccatttcaaacagctacataacatttacaaaaactgatcatatttcatgttaccaaaaaaatttccatttcataaagaaatcttcctaggccacattctgaccaaattgcaagcacactagaaatataaaataaaaatataacaacataatgccacttagatatttaagcacagtcttctaaatacgttatgccaatgacaacacaaaaattaaagactccttagaggcccatacagaggaaaacacaatcaagatttcagtagatgaacctgtcttcagaggaagtacttgcattgtacctcctgggctcaagtgatcctcccacctcagcctcccaagtaggtgggacttcaggcaatatattaggcaattaagtttttatgaataatatacgaggaagtctttaaaaataggtaaatgaagacaatagaaaaagaggcaaaagataaaaaccgagcactctgtagaagaaaaaagatgtgaacaggacacgcatgaaaaaaatgctcatcctcactaataaaaaagaaataccaattagaacatcagcaccctgtcatttccctgtatcttattggcaaagaataaaaagattgttcttggccaggtgtggtggctcccacttgtgatcccacactttgagaggccgaggctggaggatcacttgagttcaggagttcgagaccagctggatgtggtggcgggcacttgtaatcccagctacttgggaggctgaggcaggagaattgcttgaacccgggaggcataggctgcagtgagctgagatcattccactgtactccagcctggacgacagagcgagactccatctcaaaagaaaaaaaagattgctgtcacctggggtgagagctgtgaaggaacaggcatgatcataccaggtggaactataaattggtacatttttagagagagtttaatggtgtctatagaaatttaaatgtgtatgccaattgagccagcaattcccttttagtaaatttatcctacaggaatatttgcacaagggccaaagatatatgtataaggtattcctttcaacagtgtttataacaggaaaaggaataacctaaatattcatcaaaggattagttaagtaaatgttaatacctccacatactatgcagcagttaaaaatggagtaaatcagtatgaacccacatgcaaaggcatccgtgatatattgttaactgaaaaaagcaagtcagaacagaacatctggagtgattccactgtcagctataataagttgttattattctctataactctgtaatctttttaagtctagaaagctccatattatgaattactgcctatagggcctctgctgcctacaggggcctggcaaggagcataaatgcgtgaactggcaggacgtgcagtcagagtaggatggactggcagggagcggacaatcatgtactatctcagttgtagccaatggttgtgattcctgaccttgccaggtttccctggccagcattcatggatcaagactcaggagcagtagctctgaatttagtagtcttgagtagtcttgagtttcagccccaagacagccttttctggccccctagcaagggcagtagtagtgacccctatcagtatcactttgggtcctcttcagcaagtgctgggtgaacctggagcttttagttgatggcagcttcactgaccccctccccttgacttggtgaaatgggctccatcatgtcactctgaaactgacagcagttgacattaagattttttttaacaccatagaacttacagactgtgtttcattttggcctggttccttagtgctccagaaggttcactttccaccacagaacctccagaatcttcaggaggcctcacacaggccaagttacccatagtcccaatgtgagccctgtgtagagttactgtttttagtccttctaacctttttggcagggggagggggccaaaacagcctcagctgtactggaggagaacagctggaaataaacagccaatggatgagaaaacttgagggtcgatatcctccagttgccaagttctatcctgcttagcaaagtctctgtgctgcttcattcttcatttctaaaagtgaccttcaacttgatttccccctggccctcagtgtaaatattggcctggtcattgaggtcgtccaaagaatgatttggtctcttgtgtaaggttgccagatttagcaaataaaaatataggacacccagttaaatgaatttcagataaataacaaataatttttatttttatttttatttattaatttattttttgagacagagtttcactcttgttgcctgggctggagtgcaatggcacgatctcggctcaccacaacctccacctcccaggctcaagcgattctcccacctcagcctcccaagtagctgggattacagggacccaccaccacacctggctaattttgtatttttagtagagacagggtttctctatgttggtcaggctggtctcaaactcccaacctcaggtgatccgcccacctcagcctcccaaagtgctgggattacaggcatgagccaccgcacctggccaacaaataatatttttttttagtataagtatgccccatgctatatttgggaatacttacactaaaaggatatttattgtttacctgaaattcagacctactcagtgtctcgcatttaatcctgcaagcctgctccgtgggccgctggggctctccctttctaagggaggcacctgaaagtgtgaggatcaagagcagtaggaggtgtcagtaataaacctaataagcactgtccagggcatgacacgtcacctcagccccagagcctgctgaatccccaactcctgcttttctgtacctccccttcctcccactggcttctctgcttctgagctgcctgcctctggactttctcttttagtctgtgactttcccctaccctcacctctcctcttttttcctcattttgctctcactgatccgtaacacgtaattaaagtttacatatttgagtgttggttgtaattactaaataaggttttatgttccttgctgtaatttaaatagcaggggaatttaactttttgtgtgtgtttcattttgcttttattgataggtggccttaaattcatttttagccatgtgaatcactgaccttcaccttgagctgagagaaaggccttccatatctggaatgaactcatgcacatcttcctagaacagatgccaacggaggaagtggggaatgggatagactgaggtggtcgagtgaagggagacatcactaggttgacctattcaagagagaaggagactcggaagcctcctgtgctgccccgaagcccagccttttggaattgggccccgctggcccgggagaagcctcctctctcctctttatgattgattgcctgactcctatgcagtgagaagcagcctgtcatagggaggcgcagggtttggggttagagacaagcgccccaggggccttgtgccttccctctctgcctctcccagtgggagcagacacttgaaggaaactccactctgtcccctcccaaaacaggtagtctggacaactttctgacgtccccctgtgttagaagcttctggttgctagttgctaccttcaaggactctgatgtctgttttctctcccattctctctgtctgcctttgtttttccatcccccctctccacccaccaacagagggacctctacctgtctaccagatgggaggcgttttcccatctgggaagaaaactttgaaggacagttgccatcttggagagagaatactgatctgggaatcagggagtcctctctatcctgagctatttggctctactctcttggcttcagtttctgtataaaatgaaggtgattttgtttgtattaaaatatgaataaaaacgaatgttggccaggtgtagtggctcgcacctataatcccagcattttgggaggctgaggtagaaggatcacttgagcccaggaggtcatgaccagcctaggcaacgtagtgagatttcatctgtacaaaaaataagaaaattaggggggcttgatggtacacacctgtggtcccagctactcaagagtctgagggaggaggatcacttgaccctgggaggttgagaccagcctgggcaacataacatactctgtctctaccaaaaaaaaaaaattatttatttatttatttatttttctttttttaattagccaggaatggtagcatgtgcctgtggttccagctacttcggaggctgaggtaggaggatcacttgagcccactaggaggtcgaggctgcagtgagccgtgatcatgcccctgcacttcattcagcctggaagacagactcaaaaaaataaataaatacaatgtcaaaaagtgagcaaggttctatccccaatccaaatgctaactggtttaaaaaaaaaaaaagtagaagagagacaaggtctcgctgtgctgctcaggctggtctcaaactcctgtgctcaagtgataactcccaccttggcctcccaaagtgctgggattacaggcatgagccaccgcacccagacgtaagcgggtttctgtttgttagagaagccttttcttcaccaagttaagaggaccttaccacttcattttgggaggagtgtttttattccttctatcttggattcatgaacatccaggtgttctttcttacctcttcttacaggcaggggagaatttaaaagagcctgaaagaatagttatgtgccccttgacatttcagcaaatgtttcagtagaaaggagattggctctttcaatagttcacctaatggtctgtgaccgagctgaggtgtcttcttgaccctgtaaaggaggcagctccatgagtttgagggctacacacgtcaaatggctgtagttgcccaaagaattttggatcagatctctcacctttgatgggaatgaaataacaaagcctcacccacccggggcctgttgccttttgctgagcaaagtcctgtcagccgtttagtacagacagaggcttcaccccagctggaaacccgataatgagtgaggcctaagaatctgagcttcccggggtgtgtgggaaaccaaatattagaggccacagcattccccgactccaatacttggatggagcttgtgcattcccttggttacagccatttggggctccaaaaggcgggagaggtttagccagagcctcctctcagcagttctggggggcccaatcccttgtcaccttgaagttctgtttaatccttcaccttcacagcagcaccacagcagtgaaaaacaatgaaagtcagccacacccgtggaaattcatgtcagggaaagaaggcaggaacaggatcaaagcctcttgtaacccaagaattcctcagcagctccagtcccttaataattatggtttggagatttgccagaaagcaaaaccacttagcatgccatatttaacaatgaacagttttctgtgttcataatagtcactgtgcagagcaaataggcaccttgaacaaagagtaggatatttatatgtgtatataaaataacccgcacctaccttaaacctaaatatgttttcagagaagaatgtggtacgtccctctgctctggtacctgctttatgagtaagttggagaaaagctacatactctgcccccatccccacctccccaggtttttaaaatagaaatatttgtttaacccagaatttcccaaacttactaaatagttacactctttagtttccagctggagtaaagctgctttggttggttttgaagtttggagtgttttatgttgttttaaatatctactaacattccaaaaagccagtgtccccagaaaaactttttgggaagtgatgaccaaagagtgcaggagacaaggatgtagaccagtggggggaccgagaaaacaagtcccaagccctgaggggagatgaacaagtttgctggaggcccaggtctctgcatcaggtttaaggaaccttggatccaggttctccatgtcactgtgtgttcagttagactttatccaacaaacatttgtcattgggggaaattagagaagaatggctgcttggaggaaagttcattacagccaaaccttaaaggatgggcagaatttcaagaggaaaagatgagaaagatggagaacattccagaaagacatgggtggcagagtatgaggcctgttcaggaaaggaatgttagtgtggtacaagcatcgagtgcgtgagtagggtggggtgagatgaagcgggatgacacaaacgacctttggatcaaataggattctttcagatgcaagtgacagaatgtccaatgcagcccacttcagcataagggaggcatactggatcgtgtaactgagaattccaaggctaagactggcttaagacatgacataattcaaggactcaaacagtgtcccaaggacctggtttcttgtcatttctcccttctgctcctaggttggttctgttttcgatcagctcacacttttcttggagtttaagatggctacagcagctctagcctttacatcttcatttattcaagtccaagtcctgtgtcagtacaatcccattgcattttattggctctagttggggtccaggcctatccctgatctaatctcaggggccagatgccagtgagggcatcatattcctggcctctgagattagttcagggataggcctggaacctgtctggagcgggtacccatgcctggagttgagggtagggttagccccacccaaaccacatggactaaaaggtgtggaggggctgggtctccagagggagactggggacagctatccaaaggagggcgaatggaaggtgggcagcaaaaacaacagatgtctgctaaaacctggaatgctaggccaaagaacctggatatcatttacatcagagaaccagtaaagatttttgagcaaataagcagcgtgatcagagctacacattaacattaattcagctacagtttaatagctgccatgtacttggcacatggtaggtacttaatataattatatattgaatgagtgaatgcaaaaagagagatgagtagctcaggagaggagagagaaattaaaggtgggcagcatttttaggccatcgtagcagtttggaaggggagctagcaaagggaataacgaagacccatcaagaaaaccaagaggttccattgtcatgaaacccacataaggaaaaactatcaagagggcaggtttggtcacccacgcaaacactgttgaaaggtcaggttaaggacgatgaggattgagaaaatgtcatgagtgagagttgagagagaaggttcagtagtgggaggttagagccacctttaaggagtttagaagtaagtaggaggtaggcaaagggcccaagtgttgaccactctgctacatcacctgtcttcttatcctccccaattcaaactcagcaaaaaaggtgctctttcccctgcacacatccttcacacagcaccttatacctcccccatgacctctatccagccacgattccctttcctcccaggcgtcttcaggttctccttctctacctccagtggctccttctcatacaaatatttacatcactcccctgccctaaaaccacatcttctagaccctgatctgtcttcaagccaatgtttcaaaagagtcattagagaagctttgactttgagggggacggaagtttgagcttatgctgaatgtccttgtagaagtcaagattatcaagaatgtcaagtcaagaagtcaagaatgagtggttagggagtaagatgtagagacagggaaaagattggaacagtttatatagaggatcagttaggagtcaccagaataggaagaaaagaattaccagaggacatggagattccagctgagattaaacagcgtgagtttatagacagcttcatcagcagactgccgctactcagctggaattggtggctcaaagtagaacagtagattgggtttggggagaggtggctagggaacattgttgagcctggtggcagatcagattgacaagagcactggggactaggaagatcatcacaggcctggggaatcctggataatgtagaataatagcctgggagagagggcaaggtcaaggatgtggtcaggagtagggggcgtgggtaatttcagtggaaaaggtagaaggttaaacagtcgtgttaggaatattaaagaggccatatgatgtgggagccatagtgtgtagactatgtggcttaaatcccaaatcctaaactgtgtctctctgttataccccattataaaatggggctcataaaacctactttaaaaggtcattataattaatatatatgaagtacatatgatagtgccttgcacataagtacccactaaacgttcgcaatgatactgatgttcatttcaaagtgatgataaaacttagaatttgagatcttgagttgaaacagttctaaataatgacaagttctcagatgtcatcatggttaattgggagtagagtaaaatcagagatggggagtatttgaattgaagaggttgaaaaatggtgaaagcaaatactgggagggacatctttatggatgtggaagtcccagatggggtggccatggcgcagtcattgaagaaggccaggtctgtagccagcaagaatggggagatggttagtatggacttcaaaagagagattgtggggaatggcagggggattatctaggagtggcagaaggagtttgctattccgtccaagtcagagactcagggacagaaggaacagccccgaatggaaaatcaggagaatggtagcttctgccgggaggaggaagaaacacggaaaagatgacacatatggagaatttgctcacaatatgacagattttaattgaggggaactattttttcataagagcttttgagaaaaactattccctgaacatggggacacatctgaaaaaggcatgaggataggggaggaggtaggaggttttggagtagatttctgagaaagccaacagagggaggccctgtttcctcaccatgattgtaaggtgcatgacatgagacaagctggctcaggcctgtgggctggtgctaggcatgccccagctggacacagctccctgtggccctgccacatctcccactcgggagtacacagtcccacagtaccttagattgctgtatttcccagaccggtgtttcgcacgctgacagagacaggaagcagaccaggtgagctgggattgggggcttctgcttttagagagcagagagcaacaaatgggtttaaaggagaggaaacaggacaccagcaggcttcagggctgccttctcttccaagagtgctgctctgtaatgtaattgtatttggacattttttccacatgatgtcagggtatagcctcccttaaaagccttcatgaaaaagcacaactataaaacagactcaggcagtgaaatggaaaccagacgagtggttctgtgtaatttaggtaaagagatttctctttgcagctttgtgatctgatctgatctctgctctctgcataaaactgtgtttcacaggatccacttacatttgagtcttaccatgcaggtgatttcagatgtgaaatgtcttgctttattaccagaaagcaagggttcccttcttggtggctgtgcagaccacccctctcaggctgcaacctttccagtcttcttgtccttgtgtgagcccagaccccagcaaacagggaaggaggcctgaccccttttcactcttgttttaacccctctgttcaccttcgtctgtccacccctcacctcccttcttagggttagtctttggagaatgcatcctggggagaaatactcattgaagaggcccaatccctttaaagcaaatgggcccactttcctgcccattccctttgctttaacgcctcagggacacagaattgaattacccattgtcctctgttcttgacacactatcctgctccatccccatgagggtccttttattttattttattttactgtattttattttattttattttatttttatagagaaacgatctcactatgttgcccaggctggtctcaaactcctgggtttaaggatccttcgatcttggcctcccaaagttttgggattacgggtgtgagccaccatgcccagcccctttcttttttcatgtttatatattattgagatgaaataaacataaaattaatcattttaaagtatacagttccagtagcgtttagtacttttacagtcgtgtgcagtcattaccactatctagttccagaacggtttcatcacttccctaaaaaccctgtacccattaagtagtccccactatcccctggcctctggcaactgccagtctgctttctgtctccgtgacttttcctattaagttttttcatataaatggatttatatatgaccttttgtgcttggctattttcattagacataatgtttacaaggttcatccatgctgtagcgtgaatcagcacttttagttctttttatggctgagtaatggtccattgtatggatctaccacattttatttatccattcatccattaatggatggacatttgtgttgtttccacctcttggctactgtgaatagtgctgcatgaacattcatgtataagcttttatttgggtactgctttcagttctcttgggtatgtacctaggagtggaattgtgggtcacatggtaattctttgacttattgaggaactggaggtcctttcttgatggacatcctccccaggtctgctctgacaaggaatagcaggcatgttccaacctatccccacctcccaagacactgagaattggcacaatgtcatcattctgttagatctggaaataaaccgaagaaaaaagagtatggtcaccacagagatgctggtaatcagaagaaagacagcttggatgggggtgggaaggggatggggtactgagaagattcagggtcacttgaaaagatttgactaaggcccaggaagaacttaagagaaagggactcagccacccagaatgaaggaaattgtaagcctaaaatacccatggctggtacagccaatccactagtgatgagggagggatataagagagctgtgaacttactttttcctgcaactagggggccgggaagccacgtagaaagagtctttaatgttaaggatgtaggacatttgggccttgtgggagcactgaaggcttttagactgagacataatcaggtcagagttgtcttagacaggtcaccctgaccacagggaaggggaaagcttggagtctagacaagactggaagcaaggagcctgcttagaaagctaccatcattggccggccacaacgattcacacctgtaaccccacattttgggaggccaaggtgggagcaatgcttgagcccaggagttcaagaccagcctggacaacatggcaaaaaccctgtctctacaaaaaatgcaaaattagctgggtgtagtggcgtgtgtctgtagttccagttactcaggagactgaggtgggaagatcacttgagcccaggaggttgaggctgcagtgagccatgattgcaccactgcactccacccagcctgggcaacatagttagaccccatctcaaaaaaaaaaggaaggctaccattgttctgagaggaaggatggtgaggatggaccaaggaagtggcagtggggatggagaggtgacaagtttgagaggtgtttaaaaaggggcacaattgtcagacaggttactgtgcatacagaggtgaaggcagagcatgagatgctgtggagaagaaaaagtaaagcaggaagcagcagaggagggcgcctcagagttccagagagctccagagcactgcacacactgccgagagagcccagtcagactgggcacgaggctgagagtgtggggacaggaagcctgtggaagcggcccgggccgctccttctgagtgagggctaaatatggaggagatttgtgtcctttttcttccttcaggtacaaaactttcaaaacggattccatgtgttttgatttcaatattttgacctggaggacactgtgactctatgtaaatgcaaatttctaatctgaattatatgaacattaattcatttcatcaagaaattattttccatcgtaactcctacaatccagtttaattccttaatcaattttctttactgagcgagcgtggtggctcatgcctataatcccagcactttgggaggctaaggcgggcagatctcctgaggtcaggagttcaagaccagcctggccaacatggcaaaaccccatctgtactaaaaatacaaagaaattagccaggcatggtggtgcacgcctgtaatcccagctactcaggaagctgaagtgggagaatcgcttgaacccgagaggcagaggttgcactgaaccgagatcatgccactgcactccagcctgggtgacagagcgagactccgtctctctctctctctctctgtctctctctctctctgtctctctctctctctctctctctctctctctctctctctctctctctctctatatatatatatatatatatatatatatatatatttctgtatggagcagtgaaggcatttcctaaagttctcctttattttcttaaatatcaactttttttttgtttgttttgttttgctttaagatagggttttgctctgacgcccaggctggagtacagcagtgtgatcacagcttactgcagccttgaactctgaggctccagtaatcctcccgcctcagcttcccaagtagcagggaccacaggcatgtaccaccacattcagctaatttttaaattttttgtagccacaggttctcactatgttgcccaagctgggcttgaactcctgggctcaagtgatcctcccacatcagcttcccaaaatgttgggaatataggcatgagccactatgcccagcacccccctttttttttttttttttttttttttttgagacggagtcttgctctgtcgccagtctggagtgcggtggcgcgatctcagctcactgcaacctccgcctcctgggttcaagcgattctcgtgcctcagcctcccgagtagctgtgattacaggcacctgccaatactcccagctgatttttatatttttagtagagacggggcttcaccatgttggcaactcctgacctttggtgatctccccacctcagcctcccaaagtcctgtgattacaggcatgagccacctcacccggccgtgcccagcctttaatagtgattttatttttattcaacaattttagtcagtaggacttttcatgcccagttttagaacttgtgagttttattttttgtgtttgtttccaccaaatcacaatttcccccagtcattgtcttgttatttgcagtttttagtgttactaacaaaatgacttctggggtcggttactttgaatttttttcatgtgctgccattttcagtgtagtctgattatcttcactattaacattcactgaaaagtagaaaacagcctgcctcttcctggagtccctcctcccagcttctccactgaagacctggtgcttaaaggaagggaagttttctgggcagtggacccctggagtctcgaaacccttaagactcaaatgctcctcttagcaggtaatttcaatccatcccgcaacagtttgagcattcctcctttttagttggcccaaaacccagagtcttgctgccctctaaactctgaattgttctcccttccttggcatgttcctgaaaggttttctgtggacctctcccttctcttgcctgccttccaggcttctccacactcagcgtcagcctagggccatgtcagcggtgatttcccatgcctttgggaaatgtagtcactccagggaggctgctggggagtgttggccacaggggacagataggaaaggccttgagagctctggggagtaaactccatttcaagatataaaattcccagaaattttgaaatcacaggcattttcattttgaacactgtttataaatcttaaaatcatgttgtgagtttaaaagtcatttataccttgatttggtcattgcattaccataaactgtatttgttctatttagagctgtaaaggcctagggggtgaggtagggtgcctatagtaagggaactttctggattctgtttttttttgtttgtttgtttgtttgtttgtttttgagacgagtcctgctctgtcacccaggctggagtgcagtggcgcaatctaagctctctgcaacctccacctcccgggttcaagtgattctcctgcctcagcctcccaagtagctgggactacaggcgcccaccaccgtgcccggctaatttttatatttttagtagagacagggtttcgccatgttggccaggctggtctcaaactcctgacctcaagtgatccgcctgcctcagcctcccaaagtgctgggattacaggcgtgagccaccacgtccagcctctggattctgtataagactgggaggcgggtgcctagtaagggaactttctggattctggataaggctgggaggtgggcgcctagtaagcagactttctggattctagataaggctgggaggtgggcacctagtaaggaaactttctggattctagataaggctgggaggcgggcgcctagtaaggagactttctggattctggataaagctcggaggtgggcgcctagtaagggaactttctatattctggataaggctgggaggcgagtatctagtaagacactttctggattctgcataaagctgggaggcagtaatgttaaagtcctcaagagagaaacattatcttcttgagtttttctgattttcaaattctagtcttcagttacacctcaggaccatctgcaccacccacccatatcccaccagtgtgttttgggagccaagcagtcccctttcttgagctctgtgctgtgtttacagtaccttgactgggcacattcttcaagactagcacagtgccttttgctcatgacagctctgttgaaatgaatcagtcatttgcttttcctctctcccacctgaagccctgagtaagctcagagggttgagggtgggagtgggaaaccaggcaggtgacaatgagggccagtgaagcttcacaaagaactcagaaggaaccagtaagtcttaggagctcaggccaagaagacttactttcttataaaagaaagaagttgctgggcgtggtggctcatgcctataatcccagcacgttgggaggccaaggcgggtggatcacctgaggtcaggggttcaagaccagcctgaccaatatggtgaaaccctgtctctactaaaattacaaaaattagccaggcgtggtggtatgtgcctgtagtcccagctactagggaggctgaggcaggagaatcgctggaacccacaaggcagaggttgcagtgagccgagatcacaccactgcactccagcctgggcgacagagcaagactccgtctcaaaaaaaaaaaaaaaaaagaagaagaaagaaagaagctccagtagtgaaataagctgaagaaaactgaagtgacttcaaggaaaggaaaaagagaagtttcaagatccaggctggtcagtgaggaatgtggaatgtgtcctcagagctggtgaactctgcccaggcagaggagaggaggctgatggaaggcagacctcaggttgcccagcacttgccagtctgtggaagcctccgtcactggctcatgacacaggggtagggaggaaagaagagggctgggtgctgccatgtccaggaggagtgctctggggtgagtggccatgcagataggaatgaagtgcaaggcacttaccacctggtcagagttggaggcgatcgaaccctctgggaggctctgcagagtgaaatcatcaaggagcaggcatagggagggactcatctgctgtggagggactggctttgcacttttcacaggaaaggcctgacacagttcaggccccaaaggaatcgtcaccaaatgcaagaatgccaaatgcaggccaaaatggctggacagggcccactgcttgctctgctgtcccttcacacaccagggccccaaggactggcctttattacctgctccagaacagccatgaagcccacatgaacagcccatgggtgccgtaccctttcctgctgagctccagagattgccacaggaaacaggagtgaggtgcacacaaaactgggtataatggaagcacccggaagggctggaggctgtgacagctccaggttgtaagccccctggagaaccacgtctttttcacagatggtattttctgagagcaatatttgtttgaatccattccttatttgctactgtggtttgaagtgaacaaatgcaagtatttttctagggtttgagctgagtgtactgttaactggctataatttatcagtccctttttggtgaagtatgtccctattgaataagaagtgcacactttttaactcttatgaattgcttattttcattcatattggctgtgtccatttttaaaatcaggggaaaaattttatttacccagtgttttgaggtgggcccacatttttaaaatcatagttattttaactttaaaaataaagattttttggaatgtattgttgattaaaaataataataaagattttgaaattatcttttcttttaaatgaaaacaaaggatttgctagggtatttctggtttcataataggtcaccaggaaacatgtttacatcaggcagtcataggttttaggcatgtaacacttctgtggagtttgtattctttgggaactggacctgcaggtattctggggaacccaggccatttgttccatttgaaaatagctaaagcatgaagaaaaggcaaattcttagaattttaaagggttttctctcaagtagttttaaaatttcaaatgatggtgttgtatcccttcccttcagacctggaatcacattttcccctcaagacagaaagggctctgcggcaggttgtgcctgggaaggggctgcttctcatttgtggccacctctctgcccaggagctggtgaggaagggtgaactaggggatgcctttcagaacaaaggaggtgaggagatgagcccctccacatctgccccaaatagagaccggcgtactagactgagcactcacagagacgttcacgaagggactgtttgcggttgtgtgagattggaggcaggcctacagcagggcttctcatcgttggcactgtggacattaattggggtggtagggctatcgtgaacactgtagaatgttgagtagcatctctagcccctacctactaaatgccagtagcaccaccaactctgactctgacaaccaaaaatgtctccagacacgggcagatgtaccctaggagcagtgtgccctctggctgagaaccatgggtgaagggaagcagtcatgatgttgaggcacctacagacaagaacagtaggaagcccttcccacccctctggctgaaagggagaccccaggaatagtggaagtcagggaggaggagctgcccagcaggtgccctagccatgagggatgcagccactgctagaatcttcgcaactttctggggagggtgcaagaaagaaataccgccaactcctctcacttctaccctccagtataccagtgctcccttcacattaggagaagtcagctagaagcccggtggcaaggacacctgggtaaggcagtctattgaaatcagcatcttggggcactgggcagggtggaggaggggcacagaatggaaaacggaaaataatcattctgttcatccatccatccatccatgtattcagtacttatgagcagcttagcaaagtggtcaagaatgtaggtgctgggccgggcacagtggctcacacctgtagtcccggcactttgggaggccaaggtaggtggatcacttgagctcatgagttcaagatcagcctgggcaatatggtgaaaccctgtctctaccaaaaatacaaaaattaaccaagcatgatggtgtgcctatagtcttagctacttgggaggctaagatgggaagatggcttgacctgggagatggaggttgtagtgagctgagaccacaccactgcactccagcctgggtggcagagccagaccttgtctgcacagaaaaaaaaaagaaaaaagaatataggtgctggagtgctggagtcagataagcctggatttgtatctggccctaccacttgcaacctgtatcctgtatgatcttgaacaagttgtttatctaaatgtcagtcaccttgagtataaaatggcaacaataattctatctacctagaccttattcttgcaatcttggatttttccccaatgggaaaatgcaagtcacaagtaaattgcatagtataagaccacagtcaagtgctaagcgggtggtatctgggcagtacccagtgttggttttatagacagtcctgggaaaggaaagacacagggttcagccatgaagtgcccccctcagcatctgtgaacaccttgagcactgtgcagatacagtggagaaaaagtccccagtgggctgagaaacaccacaggatctgcgttgcgtcctgagggacaggccggcaggctaagtgaaaaggaggaagaagggaccccagagcagggaatggtgagtgaatcaaagccaagagagttggagggagggggaaggcccagatagcagtgtggggagaccactgagatgaggtttggttgagggactcagtgttctctcctgtaaaagtaaggggagggcctggggccagctgccttcttcagtaccatttcacaggggtcaccaactcacatgtccacagagaccactcaagtgagcacgcacgtgaaaggcgcgcgatgggaggcagtagggcggtcccaggctggaagcatccgccttctgtaggcgtggccaccgctctgctccagcagctgctgccgtcttctaatgcaggcctagagacaccacagtctgattttcctaattttcaaaagatgctagaaatttggatctttatgagaattgccctgatttttttttaaatccatgtgagctgtactaaatagtccctttgcacccctgtccagacactgctggtaagtccagacaggggtgcaaagggactgtttagtacagtttagctgacacaactcagcttagaacccaagttgtgtgtgtttggattctgcctccgcatatactttcttttaaatagtaggctctaagacttaaaacaaaaaggatgccaggcaaagtggctcacaccagtaatcctagcaccttgggaggcctaggtgtgtggatcacttgagcccaggagtttaagaccaacctgggccacgtggcaaaacccgtctctacaaaaaatacaaaaattaggggggacatggtagtttgtgcctgtagtctcagccaccagggaggctgaggtgggaggaccacttgagcctgggaggtcgctgcagtgagctgtgattgtgccactttgccctagcctgggcgacagagtgagaccctgtctcaaaaaaataaacataaaaaaaaggaagaggggtccacctgggcccggtgaagtctgaattccccccagacttaatatcatggccaggtagggatttgggggaagggatggctgtggacaagggcacagacagggacgagggcagagagagggtgggccatagtcctggtgctgcacccggccctggcacttggcccagtgcatgctgggactagggctgcccttgagagctctggccagcacatttggttcttctttgatgaaattttttaaattttcagataaaggacagagactgttaaccacaaacacctatgttccccgacccagacttcctactgggttctttgcagctggggagatgatccccttccattccttaggacactgaccttcctctgggccatttgtctccagtaggggtcagctgggagcttttaattggtggtaaaggttgaaatgatggcatttgatagcatggccatgaatgtactcacagagtgccccacctggaatcccagctctgagcctgggctctgatggccctggtgggtggagagccctggctagtctcggagtagagggtaaggggaggtaggggactgagaggcttctggcagccccaggaaatgttgactggcagagtcagctgaaccgagcttgtttttcatgactaatttaaagttcaggctcttcccctgctaaggggaagtgaagacgaccatggagaagactagaaataatgaggttatctggaaacggcctcatgaaacctgaatgtatttttgctcagaaaaaaagaaagtgcagtaacactcactccgtcagacgctgcctttgctgcccaggccaccccagcctgcctggcctcgcctccagtcctccctttagtgggcagcttgtctccctgcggcccaagcttgggctcctcactgcctctcggttgtgtgtgtcctctcacccaccctgcttagcctgtctgtgaagccacctcctccttccacatttgtttttcctttctgtcttttgattacccctactcatgatataatttgtctgtgtcacacaccgtcttcgactgtttcgtcacacttcgtgtgggtcagcttgcctctggcaactcttctctctcttagagtggttttctgggtggttttcctcatgtttcacacagcgtcctccacacacaggtgatcaataaatacttgtgggtagataaaatatcagattgatgggtgaatgggtgagtgggtggatgggtggtgagttggttggatggcagggccacccaacaccttggccagtcccctaaagctgagggatttttcagatgcctgaaggaggattctccagagctaggggcagggagaattcaacccattgccatttgcacagcatttactatgctgattgccctctcttgagaaggactagaaggcagacttgaccaatggccttagtctagaagtcatctcccccataatactttaaaatcagaccatgggctttttaatccgtggtctgaaatagttttcaaggttggcacctggaagacatccactttgacatctttctttcattcagtagttgaaagcaacctcaaagtctgtgacttacctgtctacctgcctagaaattaataatcacttcccctagtggggggaatcagaggctgagatttgtagtggaggcaacacactgtgtgaggcctgggtcttcacctccagccctgttggggggcgggggatgggggtggaggcgctcatcgtggaggcagagaagaagcaccagggagtatcagcacataacagggtttctgatagctaggcatctgccttggatggggagccctgatgtggctggggcagtagcaagatgaaggctatactgcagcagccctgaaggctctggtttgcttccctcctctgcagtcccagtgagttatcccttcacaaggatggaaggcaccagattaaccaattctaaatgctgatccatcacatttccaacatgattccaaatgaccacatgttaatcccacttgtgtaggcctaccacagacatgaatgtgtaccagctaaccccacccatttgaagcactccaggaagattctagggcatatttcttcttgccctagcagtgtagccggtgggaggaagagcctcggagatcatttattccccacattgacgtcttcctcccaccaacccccagctcccacagctcttggcatgtgaaccactccactgagcacctgatgtccctgctgttgcctgggtgtttgtcttaccttcccacctagacctcctgcttcttcattcccttttgtggctgattactattccattgtatgaatttataacagcattttatttatccatttattagctgatggacatttgggttatttccacatcttggctcttatgaacaaggctgctatgaacatttatgtacaagtttttgtgtggatgtgtcttttttctctctcttagatacactcctaggagtgcagtttttgggtcataggtttaatcttttgaggagaactgcaagactgttttccaaagtggctacaccattttacactcccactaaaaatgtatgagggttccaatttctccacatctttgccaaaacttaacttttttttattatagtcatcccagtgggtgtgaagtggaatgtgactggggttttgatttgcattttcctgatgattaatgatgctaagcatcttttcatgtgtttattaagagtattaagagttctttatgtagtttagatacagtcccttgtcagagacaggatttgttcatattttctccctttctgtgaattatcctttcactttctttttgatgttactttgaagcacaaaagttttccattttgacaaagcccagtcttccttctctcccttctttccttcctccctcccttccttctttccttccttttttttttttttttttttttttttttttttttgagatggaatcttgctctgtcatccaggctggagtgcagtggcacgatcttggctcactgcaacctccacctcctgggttcaagcaactctcctgcctcagcctcccaagtagctgggactacaggtgtccaccaccacgcctggctaatttttgtatttttagtagagacagggtttcaccctattgggtcaggctggtctcgaactcctgacctcaggtgatccacccacctcagcctcccaaagtgctgggattacaggcatgagccacagcacccagtctgacaaagcccagtttctctagtgttgcttgtgtttttgatgtcatatctaagaagtagttgcctaattcaaggtcatacagatttacttctatgttttcttctgtgagttttctaaggccaagcgtggtggctcaaggccgggcgtggtggctcacgcctgtaatcccagcactttgggaggccgaggcgggtggatcacgaggtcaggagttcaagaccagcctggccaagatggtgaaaccccgtctctactaaaaatataaaaagtttagccaggcacagcggcaggcacctgtaatcccagctactcagggaggctgaggcaggagaattgcttgaacctgggcagcagaggttgcagtgagctgagattgcgccactgcactccagcctgggtgacagacagactccatctcagaaaaaaaaaaaaaaaaaatcaaatgagttttctagtttttgctcttacatttaggtgttcggtacattttaatttttgtatattgtgtgaggtaggggtccaacgtcattctttcgcaggtgtgtatccagttgtcccaggattactggttgaaaagaccgttttttccccattattttggtacccttgtcaaaaatcatttgaccataaatgtgagggtgtgtttctggactctcagtctgttgatttgtgtaatctgcccttgctgttctgttgatctatatgtctatccttatgccagtaccacgctgtctttattccctggtttttttttttttttttttgagacagagtcttgctccatcacccaggctggtgtgcagtggcgcgatctcggctcactgcaagctccgcctcccgggttcacgccattctcctgcctcagcctcccgagtagctgggactacaggcgcccaccaccatgcctggctaatttttttttttttttttgtatttttagtagagacggggtttcactatgttagccaggatggtctcgatatcctgacctcatgatccacccgcctcggccttccaaagtgctgggattacaggcgtgagccaccgtgcccggcccacgctgtctttattcctatagctttgtagtaagttttgaaatcaggaagtgtgagtcctccaattttgttttctttttcaagattgttttggatacacagcagattctttattttttgtagcaacacggtcttgtctcaagtgatccttccaccttagcctcccaaaattaggggattacaggtgtgagccactgagcccagcctctcagcagattcttaaaacacacttgttgcttggctgcttgctttcttgtttccttgatggactggccagcctgtaagagcctagctggcctgcatgcttaagtgacaaattcctctccctactccagcctcccttcataaggcatttggccagtagagatctaggcagttctggctgagctgtcttagtccagggcaaggtagtaagagaccgaatttggcaggttgcagctggtccctcaagcaggagatctaaatccaactcatccttccccccgcatccccaaaacatctcagcattccttcctcttctgtccttgccttgcaggcttggagtctgggtagttaagagttctatctagacccacttctggccacatcacaccagctcttcccttttgcctgtcatcccgccactctcctgccccttcctaaccatgattcatggcaaaatggtgcaagatgggccaggcgtggtggctcacgcctgtaatcccagcactttgggaggccgaggcaggtggatcacaaggtcaggagatcgagaccatcatggctaacacggtgaaaccccgtctctattaaaaattcaaaaaaaatttagccgggcgtggtggcgggtgcctgtaatcccagctactcgggaggctgaggcaggagaatggcatgaacccgggagacggagcttgcagtgagccgagatcccgccactgcactccagcctgggcgacagagcgagactctgtctcaaaaaaaaaaaatggtgcaggatagaggctacctgtcctgtcaggtggggctagtgcagcagcctagccttccttggtggcatctctggtcacccccataggttctttatggactcaacaggaatgtcacttgagctgcagatactgattttgctgatggatgatgaaatttttttcttccctgttgggctttcagtccttgccttaaggagaccataaaaaaagtggtgggaggccaggtacagtggctcatgggtgtaatcccagcactttgggaagccgagggggcagatcacttgaggtcaggagttcgagatcagcctgactaacatggagaaaccccgtctctactaaaaatacaaaattagccgggtgtggtggcgcatgcctgtaatcccagctacttgggaggctgaggcaggagaatctcttaaacctgggaagcggaggtcgcggtgagccgagatggtgccactgcactccagcctgggcaacaagagcgaaactctgtctcaagacaaaacaacaacaacaaaaaagtgataagctgggcacagtggttcatgcctgtaatcccagcgcattggaaggctgaggcgggtgaatcacttgaggtcaggagttcaagactagcctggccaacatggtgaaaccccatctctactaaaaatacaaaaattagccagccatggtggcaggagcctgtaatcccagttactcaggaggccgaggcaggagaatcgcttgaacccgggaggtggaggttgcagtgagctgagatcacgccactgcacacaagcctgggcaatacagcaagactcagtctgagaaaaaaaaaaagagtgataaacccactgggtgcagcggctcatacctgtaatcccagcactttggaaggctgaggtgggtagatcacttgaggtcaggagtttgagaccagccgggccaacatggtgaaacccagtctctacaaaaaatacaaaaattagctgggcaaaaacaaaattatctgggtgtggtggcacatgcctatagtcccagctacttgggggctaaggcaggagaattgcttgaacccaggaggcggaggttgcagtgagccaagatcacgccactgtactccagcctgggcaacagactctgtctcaatcaatcaataaaagttgaagggaaaaaagaaagaaaaaggccacttaattatcccttctctatacagattctcagccaattgagaactgcagaaaggagttaggtagaggtaaaaatggagattgtattgtaggtagaggcccagtcaacacatggctcagacccacagccaaaatgcaccttcaccccctccccttttctgtttcctggtttaaatctgggttctaggctgcagagcaagcagcatggggaacggggacactaaagggcaagtgtcctgggggacttatctggagctctcaagatggtgagatcagtactttcacctgcttacatgcaactaggtgctgctgtgtgacctctgaatagtcctggccctactgcagggtcactacccctgctgaccccaccatcaaaacctctggattgttgatgctgggtctccaaatctgcgctttgcatgcaccatgaaacttgttgccaactgtaatttcttgatgtgtgcaagtgggttacataatacccaacccataggatgctagaaggactggggagacagcatttgatcagggcctggcactcactaggccctcagtggggccatcccagtaagcctggttcaacacccacgggaactaagcctgctgttgcagattctcggtcgtctgcctgtgtgccgagtaagtctttcgggggccagatggtcagggtaagtctgtgtgctcaagttagagatgtggatttgggagtgatcagggctcaatagaaatgcatcattgaaagacaggcctttcaatgtcagttggtgcaagatgggcctacagaggtccattgtgcagtgggctttcagtcccgtgtttcagacaccctccaggtttgggatgggaggggcagagttgttaggggaagtgacaacacccctgagcctccctccaaacccatatttaggattgtctaaggccaaatgttgaaataagcaatggtttccccaaggccccctgcttcctctttctgcacccttctattctttcagtgcccttcctccaagcacccaggaaaacaagggtccaaaaacaaaaaactccgagacagagggcagcaaaataggagccaaatgcagcctaccacctgctttttacagcccatgagctatcaatggtttttacatttttaattggttgggaaaaaataatattttgtgacacattaaattcaaatttcagtgtccataaataaagttttattggaacacagccacaaccatttgtttacagattgtccatggctgctttcagccgaggtgaggaggtataggcttgcaaagtctaaaatattgactctctggccctttaaggaaaagcttgccgatgccctgctctaggatgtgtcttgtgcccaagagatctgctttccaaggaaagggcaaaccagtcaaatccaggcagatgtgcagaggagacactggacagggaagccttcctgatccttctggtgacactggaggagcagaggggagataactctctaatcctgcagatggaactgcttctgtccacactgagttagggggcatggaaacagtgggttcaggcctatgactcattctaacagtataaatagcaggattcagaaggtgattaatcgtctccagtgagcccaccctaccagcttccctgccaggctggtggcagcgattttacctgaggcctttattgttcccagggtcctgcaggctgccctggggtcggccctgagcagtatattcattgctcacctttctcctgtctttgcagagtttgccttctgccaggtggatgcctccatcgctctggccctggccctggccgtcctgtgtgatctgctccagcagtgggaccagttggcccctggactgcccatcctgctgggatggctgttgggagagagtgatgacctcgtggcctgtgtggagagcatgcatcaggtgatcccggggtgtcaggggagtaggaggcagggttggagtgtcctaaacccgctagatgcagcacctacagcctcagctgggcttttgcatgcttagacacagagcaggaaccactaggaaagtcacccactgggtgctgccgaggacacggggacactcttaggctgacttctggggtgctgatggtcagcctccagcttagccaggggagagaactcggaaagaagcccctggccgggcacagcggctcatgcttgtaatcccagcactttgggaggccaaggcaggcggatcatgaggtcaggagatcgagaccatcctggctaacacggtgaaaccccgtctctactaaaaatacaaaaaattagccgggcatggtggtgggtgcctgtagtcccagctactcgggaggctgaggcaggagaatggcgtgaacctgggaggcggaggttgcagtgagccgagattgcaccactgcactccagcctgggcaacagagcaagactccatctcaaaaaaaaaagaaaagaaaagaaaagaaaaaaagaagcccctggatgcggagagttttattatggagactgcttgttagtcagtattggagttagcctggggcttcccaaagttaggtctgagggtgaagcattttcagagaattaggatctttgctgggaacttcctgcttgaagaaaactattattagccccctccagggtgggtgcagtcacagatagggaaactgaggacaaagacaagcagcaaaagcatcctgagaactgaaattgatcgccaccagcatctgactcagctggccttcttggcatccccagcaggccaagggttcaaaacgcattgtccctctttatgagaaatttggagacatggtaagtgtctgacaaaaggaccttgagaatcacagtgttatagaaacaggacacagcctagtgtcctgtgtttggagattccttcctctctggcctgctgcagagatgacctttcctccctcctctccaatttccagctgcaccttaaactctagagcccactcccttgttgaagtccccttttcagcatccatcccccaaagtatcttgactttgaaccacaaacacatctttatccaaggtcatgttaagtctggggaaaaaattcctctctggtggagaaatacagtgagtgaaaatagaaggtgaccttcaaggctgcaagtggtgtgtgtacatggatgttgacaggcaagagtgcaccctctgtcaggtgggggaagggaaacccctcttgcatctggcagggtactgcttggtctggactggggcttgtcaccattccctgtaagactgactttcggctttttcatctgatttaggtggaagaagactacctgtttgaaaaagcagaagtcaacttttgggccgagaccctgatctttgtgaaatacctctgcaagcacctcttctgtctcctctcaaagtccggctggcgtcccccaagccctgagatgctctgtcaccttcaaaggatggtgtcagagcagtgccacctcctgtctcagttcttcagagagcttccaccagctgctgagtttgtgaagacagtggagttcacaagactacgcattcaagaggaaaggactttggcttgcttgaggctgctggcctttttggaaggaaaggaaggggaagacaccctagttctcagtgtttgggactcttatgcagaatcgaggcagttaactcttccaagaacagaagcggcatgttgaagaaaatctgggggattgggatgggggtatgtgtggatttttcctccactaaatctgcaggaaacatgttgaacataaattcaaaaattttatccc

SEQ ID NO: 13 - DNA, 4566 bp, Homo sapiens
agtcgaccgtggaccgcgctgcgagcctcggagacgccgtagaaggagacctgcttccgggactggaccaggcgcctgcgactcttctcagacgccgacgtgcacgagtgactactattaattctatttaaaatgggtgtaaagaagaagaaagaaatgcaagttgctgcgctgaccatttgccatcaggaccttgaaactttgaaatcttttgctgatgtggaagggaaaaatctagcttctttgctgttacattgtgtgcaactcacggatggagtgtcacaaatccattatattaaacagattgtgcctctgctggagaaagcagataaaaatggcatgtgtgatcccactattcaaagttgtttggatatcttagcaggcatttatctttctttgagtctaaagaatcccttgaagaaagtattggcaagctcactaaatagcctgcctgatttttttctacctgaggctatgcaccgttttacttctcgtcttcaggaagaattgaatactactgacttatactcttacaggaaagttactgacaatatttcttcctgtatggagaactttaacttgggtagagcaagtgttaataatctgcttaaaaatgtgcttcattttctgcagaagagtttaattgaaatcctggaagaaaatagaaaatgtgctggaaatcatattattcaaacacagttgatgaatgacttactggtaggcattagagtttcaatgatgttagtacagaaagtacaagatttccagggaaatctttggaagacttccgattctcccatatggcaaaatatgtgtggattgctgagtatttttaccaaggttttaagcgatgatgatctgttacagactgtacagagcacatctggattagctattattctttttattaagactatgtttcacccgtctgaaaagattcctcatttgattagcagtgtgctgcttcgttcagtggactgcaccagtgtccccgagtggtttatgagcagctgcaggagcctctgttgtggtgacatctctcagtcagctgtcttattcctctgtcaggggacacttgccatgttggactggcagaacggaagcatgggtcggagtggggaggccctgctcttggatactgcacatgttttgttcaccttgagttcacagattaaagagccaacgctggaaatgtttctgtctagaatcttagcatcctggactaattcagccatacaagtccttgaatcaagttccccgagcctaacggacagcctgaatgggaattcaagtatagttgggagacttttggaatatgtctatacccattgggaacatccattggatgctctgagacaccaaaccaaaatcatgttcaaaaaccttctccaaatgcaccggctcactgtggaaggtgcagatttcgtccctgatcctttctttgtggaattgactgagagtcttttacgattggaatggcatattaaaggaaagtacacgtgccttggttgtttggtagagtgcataggagttgaacatattttggctatagataaaactattccatctcaaatcttagaggtgatgggagaccagtcattggtaccttatgcaagtgacctcttggaaaccatgtttagaaatcataagagtcatttgaaatcccagactgctgagagttcttggattgaccagtggcatgagacttgggtttctcctctcctttttatattgtgtgaaggaaacttggatcaaaaatcttacgtgattgattattacttgccaaaattattaagttacagccctgaaagcttacagtacatggtaaagattcttcagacttctattgatgctaaaactggacaagagcaatctttcccatccttagggtcttgtaatagcaggggggctctgggagctttgatggcatgtctgcgaatagctagagctcatggacatcttcagtctgcaactgatacctgggagaacctcgtgtctgatgcaagaataaagcaaggcttaattcatcagcattgccaagtaaggatagatacattaggcttgctttgtgaaagtaatcggagcacagaaattgtttccatggaagaaatgcagtggattcagttctttattacatacaatcttaacagccagtctccaggagtgcggcaacagatctgttctcttcttaaaaagttgttttgtaggatacaggaaagttctcaggtactttataaattggagcagagtaaatccaaacgtgaaccagagaatgagttaaccaaacagcacccttctgtttctttacagcagtataagaatttcatgtcatccatttgtaacagtctttttgaagcattgtttcctggatcttcctactcgactagattttcagctttaaccattttaggttcaatagctgaagtttttcatgtcccagaaggcagaatttatacagtatatcagctgagtcatgatattgatgttggtcgtttccaaacactaatggaatgttttaccagcacttttgaagacgtgaaaattttagcatttgatcttctgatgaagttatcaaaaacagctgtacattttcaggattcggggaaactgcaaggcttatttcaggcagcattggagctcagcacaagcaccaaaccatacgactgtgtgacagcttcctacctgctgaacttcttaatctggcaggatgctctaccgtcatccttgtctgcctacttaactcagcaagttgcatgtgataatggagataggcctgctgctgtggtggaaaggaacacattaatggttatcaaatgcttgatggaaaatcttgaggaagaagtatctcaggctgaaaattctctgcttcaggcagcagcagcatttccaatgtatgggcgagtccactgtataacaggagctttgcagaagttatctctaaacagcctgcagttggtgagcgagtggagacctgtggtagagaagctccttttgatgtcctacaggctttccactgtggtgtctccagtcattcagagctcatcccctgaaggcctcatcccaatggacactgattcagagtcagcaagccgcttacagatgattctgaatgagattcagcctcgagatactaatgattattttaaccaagccaaaatattgaaagaacatgatagctttgatatgaaggacttgaatgctagtgtggtgaatattgatacttctacagaaatcaaaggtaaagaagtaaaaacatgtgatgtaactgcgcagatggtgctggtatgttgttggagaagtatgaaggaagttgctttacttttaggcatgttgtgccagcttctgcccatgcagcctgtgccagaatcttctgatggattattgacggtggagcaggtaaaagaaataggagattactttaaacaacaccttttgcagtccaggcacagaggagcatttgaattggcttatactggttttgtgaaactcactgaagtactaaacaggtgcccaaatgtgagtctgcaaaagctgccagaacagtggctatggagtgttttagaggaaattaaatgcagtgatccttcatctaaactctgtgctacaaggcgcagtgctggaattcctttctacatacaggcactgttggcatctgaaccaaagaaaggcagaatggatttgttgaaaataacaatgaaagagttaatctctttggctgggcctacagatgacatacagagtacagtcccccaggttcatgctttaaatatccttagagcattgttcagagatacgcgcctgggagaaaatattattccttatgttgctgatggagctaaggctgcaattctgggttttacatcaccggtctgggcagtgcgaaattcatccacacttctctttagtgccttgatcacaagaatttttggagttaaaagggcaaaggatgaacattccaaaacaaatagaatgacagggagagagtttttctctcgtttcccagaactctatccttttcttctcaaacagttggaaactgtagccaatacagtagacagtgatatgggagaaccaaatcgtcatccaagcatgtttctcttacttttggtgttggagagactctacgcttccccgatggatggtacttcttctgctctcagcatgggaccttttgttcccttcattatgagagtcttgctctgttgcccagcctggagtgcagtggcacgatctcggttcactacaacctccacctcctgggttcaagagattttcctgcctcagcctcccaagtaacggggattacaggtaaggaaacttaaacgatggccaaagaacagaagaggaaagacagtagtaactcagtgacctggctcccaaagcagtgaatttccctggaacaacatggttaaggttcttccaaagtataactaaaaggtcagcatcagttaaaaaaaaaaaaagtaaaaattgagtattaaatatctctatagtaataggaaattactattgtatgtaattatcacaatacttcatgagtaatatactttatatttccagtgaaag

SEQ ID NO: 14 - DNA, 4448 bp, Homo sapiens
agtcgaccgtggaccgcgctgcgagcctcggagacgccgtagaaggagacctgcttccgggactggaccaggcgcctgcgactcttctcagacgccgacgtgcacgagtgactactattaattctatttaaaatgggtgtaaagaagaagaaagaaatgcaagttgctgcgctgaccatttgccatcaggaccttgaaactttgaaatcttttgctgatgtggaagggaaaaatctagcttctttgctgttacattgtgtgcaactcacggatggagtgtcacaaatccattatattaaacagattgtgcctctgctggagaaagcagataaaaatggcatgtgtgatcccactattcaaagttgtttggatatcttagcaggcatttatctttctttgagtctaaagaatcccttgaagaaagtattggcaagctcactaaatagcctgcctgatttttttctacctgaggctatgcaccgttttacttctcgtcttcaggaagaattgaatactactgacttatactcttacaggaaagttactgacaatatttcttcctgtatggagaactttaacttgggtagagcaagtgttaataatctgcttaaaaatgtgcttcattttctgcagaagagtttaattgaaatcctggaagaaaatagaaaatgtgctggaaatcatattattcaaacacagttgatgaatgacttactggtaggcattagagtttcaatgatgttagtacagaaagtacaagatttccagggaaatctttggaagacttccgattctcccatatggcaaaatatgtgtggattgctgagtatttttaccaaggttttaagcgatgatgatctgttacagactgtacagagcacatctggattagctattattctttttattaagactatgtttcacccgtctgaaaagattcctcatttgattagcagtgtgctgcttcgttcagtggactgcaccagtgtccccgagtggtttatgagcagctgcaggagcctctgttgtggtgacatctctcagtcagctgtcttattcctctgtcaggggacacttgccatgttggactggcagaacggaagcatgggtcggagtggggaggccctgctcttggatactgcacatgttttgttcaccttgagttcacagattaaagagccaacgctggaaatgtttctgtctagaatcttagcatcctggactaattcagccatacaagtccttgaatcaagttccccgagcctaacggacagcctgaatgggaattcaagtatagttgggagacttttggaatatgtctatacccattgggaacatccattggatgctctgagacaccaaaccaaaatcatgttcaaaaaccttctccaaatgcaccggctcactgtggaaggtgcagatttcgtccctgatcctttctttgtggaattgactgagagtcttttacgattggaatggcatattaaaggaaagtacacgtgccttggttgtttggtagagtgcataggagttgaacatattttggctatagataaaactattccatctcaaatcttagaggtgatgggagaccagtcattggtaccttatgcaagtgacctcttggaaaccatgtttagaaatcataagagtcatttgaaatcccagactgctgagagttcttggattgaccagtggcatgagacttgggtttctcctctcctttttatattgtgtgaaggaaacttggatcaaaaatcttacgtgattgattattacttgccaaaattattaagttacagccctgaaagcttacagtacatggtaaagattcttcagacttctattgatgctaaaactggacaagagcaatctttcccatccttagggtcttgtaatagcaggggggctctgggagctttgatggcatgtctgcgaatagctagagctcatggacatcttcagtctgcaactgatacctgggagaacctcgtgtctgatgcaagaataaagcaaggcttaattcatcagcattgccaagtaaggatagatacattaggcttgctttgtgaaagtaatcggagcacagaaattgtttccatggaagaaatgcagtggattcagttctttattacatacaatcttaacagccagtctccaggagtgcggcaacagatctgttctcttcttaaaaagttgttttgtaggatacaggaaagttctcaggtactttataaattggagcagagtaaatccaaacgtgaaccagagaatgagttaaccaaacagcacccttctgtttctttacagcagtataagaatttcatgtcatccatttgtaacagtctttttgaagcattgtttcctggatcttcctactcgactagattttcagctttaaccattttaggttcaatagctgaagtttttcatgtcccagaaggcagaatttatacagtatatcagctgagtcatgatattgatgttggtcgtttccaaacactaatggaatgttttaccagcacttttgaagacgtgaaaattttagcatttgatcttctgatgaagttatcaaaaacagctgtacattttcaggattcggggaaactgcaaggcttatttcaggcagcattggagctcagcacaagcaccaaaccatacgactgtgtgacagcttcctacctgctgaacttcttaatctggcaggatgctctaccgtcatccttgtctgcctacttaactcagcaagttgcatgtgataatggagataggcctgctgctgtggtggaaaggaacacattaatggttatcaaatgcttgatggaaaatcttgaggaagaagtatctcaggctgaaaattctctgcttcaggcagcagcagcatttccaatgtatgggcgagtccactgtataacaggagctttgcagaagttatctctaaacagcctgcagttggtgagcgagtggagacctgtggtagagaagctccttttgatgtcctacaggctttccactgtggtgtctccagtcattcagagctcatcccctgaaggcctcatcccaatggacactgattcagagtcagcaagccgcttacagatgattctgaatgagattcagcctcgagatactaatgattattttaaccaagccaaaatattgaaagaacatgatagctttgatatgaaggacttgaatgctagtgtggtgaatattgatacttctacagaaatcaaaggtaaagaagtaaaaacatgtgatgtaactgcgcagatggtgctggtatgttgttggagaagtatgaaggaagttgctttacttttaggcatgttgtgccagcttctgcccatgcagcctgtgccagaatcttctgatggattattgacggtggagcaggtaaaagaaataggagattactttaaacaacaccttttgcagtccaggcacagaggagcatttgaattggcttatactggttttgtgaaactcactgaagtactaaacaggtgcccaaatgtgagtctgcaaaagctgccagaacagtggctatggagtgttttagaggaaattaaatgcagtgatccttcatctaaactctgtgctacaaggcgcagtgctggaattcctttctacatacaggcactgttggcatctgaaccaaagaaaggcagaatggatttgttgaaaataacaatgaaagagttaatctctttggctgggcctacagatgacatacagagtacagtcccccaggttcatgctttaaatatccttagagcattgttcagagatacgcgcctgggagaaaatattattccttatgttgctgatggagctaaggctgcaattctgggttttacatcaccggtctgggcagtgcgaaattcatccacacttctctttagtgccttgatcacaagaatttttggagttaaaagggcaaaggatgaacattccaaaacaaatagaatgacagggagagagtttttctctcgtttcccagaactctatccttttcttctcaaacagttggaaactgtagccaatacagtagacagtgatatgggagaaccaaatcgtcatccaagcatgtttctcttacttttggtgttggagagactctacgcttccccgatggatggtacttcttctgctctcagcatgggaccttttgttcccttcattatgaggtaaggaaacttaaacgatggccaaagaacagaagaggaaagacagtagtaactcagtgacctggctcccaaagcagtgaatttccctggaacaacatggttaaggttcttccaaagtataactaaaaggtcagcatcagttaaaaaaaaaaaaagtaaaaattgagtattaaatatctctatagtaataggaaattactattgtatgtaattatcacaatacttcatgagtaatatactttatatttccagtgaaag

SEQ ID NO: 15 - DNA, 5454 bp, Homo sapiens
agtcgaccgtggaccgcgctgcgagcctcggagacgccgtagaaggagacctgcttccgggactggaccaggcgcctgcgactcttctcagacgccgacgtgcacgagtgactactattaattctatttaaaatgggtgtaaagaagaagaaagaaatgcaagttgctgcgctgaccatttgccatcaggaccttgaaactttgaaatcttttgctgatgtggaagggaaaaatctagcttctttgctgttacattgtgtgcaactcacggatggagtgtcacaaatccattatattaaacagattgtgcctctgctggagaaagcagataaaaatggcatgtgtgatcccactattcaaagttgtttggatatcttagcaggcatttatctttctttgagtctaaagaatcccttgaagaaagtattggcaagctcactaaatagcctgcctgatttttttctacctgaggctatgcaccgttttacttctcgtcttcaggaagaattgaatactactgacttatactcttacaggaaagttactgacaatatttcttcctgtatggagaactttaacttgggtagagcaagtgttaataatctgcttaaaaatgtgcttcattttctgcagaagagtttaattgaaatcctggaagaaaatagaaaatgtgctggaaatcatattattcaaacacagttgatgaatgacttactggtaggcattagagtttcaatgatgttagtacagaaagtacaagatttccagggaaatctttggaagacttccgattctcccatatggcaaaatatgtgtggattgctgagtatttttaccaaggttttaagcgatgatgatctgttacagactgtacagagcacatctggattagctattattctttttattaagactatgtttcacccgtctgaaaagattcctcatttgattagcagtgtgctgcttcgttcagtggactgcaccagtgtccccgagtggtttatgagcagctgcaggagcctctgttgtggtgacatctctcagtcagctgtcttattcctctgtcaggggacacttgccatgttggactggcagaacggaagcatgggtcggagtggggaggccctgctcttggatactgcacatgttttgttcaccttgagttcacagattaaagagccaacgctggaaatgtttctgtctagaatcttagcatcctggactaattcagccatacaagtccttgaatcaagttccccgagcctaacggacagcctgaatgggaattcaagtatagttgggagacttttggaatatgtctatacccattgggaacatccattggatgctctgagacaccaaaccaaaatcatgttcaaaaaccttctccaaatgcaccggctcactgtggaaggtgcagatttcgtccctgatcctttctttgtggaattgactgagagtcttttacgattggaatggcatattaaaggaaagtacacgtgccttggttgtttggtagagtgcataggagttgaacatattttggctatagataaaactattccatctcaaatcttagaggtgatgggagaccagtcattggtaccttatgcaagtgacctcttggaaaccatgtttagaaatcataagagtcatttgaaatcccagactgctgagagttcttggattgaccagtggcatgagacttgggtttctcctctcctttttatattgtgtgaaggaaacttggatcaaaaatcttacgtgattgattattacttgccaaaattattaagttacagccctgaaagcttacagtacatggtaaagattcttcagacttctattgatgctaaaactggacaagagcaatctttcccatccttagggtcttgtaatagcaggggggctctgggagctttgatggcatgtctgcgaatagctagagctcatggacatcttcagtctgcaactgatacctgggagaacctcgtgtctgatgcaagaataaagcaaggcttaattcatcagcattgccaagtaaggatagatacattaggcttgctttgtgaaagtaatcggagcacagaaattgtttccatggaagaaatgcagtggattcagttctttattacatacaatcttaacagccagtctccaggagtgcggcaacagatctgttctcttcttaaaaagttgttttgtaggatacaggaaagttctcaggtactttataaattggagcagagtaaatccaaacgtgaaccagagaatgagttaaccaaacagcacccttctgtttctttacagcagtataagaatttcatgtcatccatttgtaacagtctttttgaagcattgtttcctggatcttcctactcgactagattttcagctttaaccattttaggttcaatagctgaagtttttcatgtcccagaaggcagaatttatacagtatatcagctgagtcatgatattgatgttggtcgtttccaaacactaatggaatgttttaccagcacttttgaagacgtgaaaattttagcatttgatcttctgatgaagttatcaaaaacagctgtacattttcaggattcggggaaactgcaaggcttatttcaggcagcattggagctcagcacaagcaccaaaccatacgactgtgtgacagcttcctacctgctgaacttcttaatctggcaggatgctctaccgtcatccttgtctgcctacttaactcagcaagttgcatgtgataatggagataggcctgctgctgtggtggaaaggaacacattaatggttatcaaatgcttgatggaaaatcttgaggaagaagtatctcaggctgaaaattctctgcttcaggcagcagcagcatttccaatgtatgggcgagtccactgtataacaggagctttgcagaagttatctctaaacagcctgcagttggtgagcgagtggagacctgtggtagagaagctccttttgatgtcctacaggctttccactgtggtgtctccagtcattcagagctcatcccctgaaggcctcatcccaatggacactgattcagagtcagcaagccgcttacagatgattctgaatgagattcagcctcgagatactaatgattattttaaccaagccaaaatattgaaagaacatgatagctttgatatgaaggacttgaatgctagtgtggtgaatattgatacttctacagaaatcaaaggtaaagaagtaaaaacatgtgatgtaactgcgcagatggtgctggtatgttgttggagaagtatgaaggaagttgctttacttttaggcatgttgtgccagcttctgcccatgcagcctgtgccagaatcttctgatggattattgacggtggagcaggtaaaagaaataggagattactttaaacaacaccttttgcagtccaggcacagaggagcatttgaattggcttatactggttttgtgaaactcactgaagtactaaacaggtgcccaaatgtgagtctgcaaaagctgccagaacagtggctatggagtgttttagaggaaattaaatgcagtgatccttcatctaaactctgtgctacaaggcgcagtgctggaattcctttctacatacaggcactgttggcatctgaaccaaagaaaggcagaatggatttgttgaaaataacaatgaaagagttaatctctttggctgggcctacagatgacatacagagtacagtcccccaggttcatgctttaaatatccttagagcattgttcagagatacgcgcctgggagaaaatattattccttatgttgctgatggagctaaggctgcaattctgggttttacatcaccggtctgggcagtgcgaaattcatccacacttctctttagtgccttgatcacaagaatttttggagttaaaagggcaaaggatgaacattccaaaacaaatagaatgacagggagagagtttttctctcgtttcccagaactctatccttttcttctcaaacagttggaaactgtagccaatacagtagacagtgatatgggagaaccaaatcgtcatccaagcatgtttctcttacttttggtgttggagagactctacgcttccccgatggatggtacttcttctgctctcagcatgggaccttttgttcccttcattatgagctgatatacctattctaacgaaggagggagaggaggaatgcacaagaaactcaggccaatgggggagcaagaaaacgaagaagtgcagtgcatgcgtcatcagtgtttaacagtcagaagcataacagttcagaacaagggctgtcctatcaaaagaagagctgaaagacagttatatgaaaattaaggtgggcgttcagactggctaacacaacaacattccatgagtagatggtattttatttttgtttatccatttcgttgggagcaaggacaaaaatgtaaacctataccttgcttatcaaaattgccaaaaaaagaatgctctgccttttaaaaaagtattgtgattttgtaaagacattgttttccaatgtaatatttggaaaaggtgtcatttccatattcctactcagatgccagtgttttgggtttttttcagggggaatttatttaaaaaggttttgctctttttttccacaaatatcctttcaaacagaaagaacccaaagagacacctcaaaatgcctgtaaaattattgcttttctttctgtaagtcaggcaggcgaggctatagaaaggaagagatttggtaagtaaattacagttttgtgattgctcccgctaccgtgactgcatgtccgtgagtgccagccaatgagacaatcgtctctcacacttcggtagcattcgctcaacctacaacactgaggaagaaagccacactgaagacacaaggaaaacaagtcaatccagtctagagaaaaacattcagcgaaacagagtaccaacaccttcttagaacatggaaataaaaaataaccccatcagagctacctcgccaaggagcatgatgaaagtccaaaatagcaccattcatcagtgtctcaggtcctgtggcagcatctcggtcacttaccacaaggaaacgagtttcaaactatgtctatacatcaagagtacatggataaaatatagagatatacagacaattgataaacataaactactaggtttgttacatctaaatgaagaaaaagggggggactctcagcctctgcaagaagcggtcgggagctgtgtgagtgaaaaggcaggagtgcactggttgtgtgaacgcggtgggaatttgagttgtggaagacattgttgtagcgaaccaggcctgaaggcccacctgtaagggttgtaaacgtggattcacagtgtgaaattctgagcattttcacttgggtcagaatgattaaaaactggtttgatgat

SEQ ID NO: 16 - DNA, 5868 bp, Homo sapiens
agtcgaccgtggaccgcgctgcgagcctcggagacgccgtagaaggagacctgcttccgggactggaccaggcgcctgcgactcttctcagacgccgacgtgcacgagtgactactattaattctatttaaaatgggtgtaaagaagaagaaagaaatgcaagttgctgcgctgaccatttgccatcaggaccttgaaactttgaaatcttttgctgatgtggaagggaaaaatctagcttctttgctgttacattgtgtgcaactcacggatggagtgtcacaaatccattatattaaacagattgtgcctctgctggagaaagcagataaaaatggcatgtgtgatcccactattcaaagttgtttggatatcttagcaggcatttatctttctttgagtctaaagaatcccttgaagaaagtattggcaagctcactaaatagcctgcctgatttttttctacctgaggctatgcaccgttttacttctcgtcttcaggaagaattgaatactactgacttatactcttacaggaaagttactgacaatatttcttcctgtatggagaactttaacttgggtagagcaagtgttaataatctgcttaaaaatgtgcttcattttctgcagaagagtttaattgaaatcctggaagaaaatagaaaatgtgctggaaatcatattattcaaacacagttgatgaatgacttactggtaggcattagagtttcaatgatgttagtacagaaagtacaagatttccagggaaatctttggaagacttccgattctcccatatggcaaaatatgtgtggattgctgagtatttttaccaaggttttaagcgatgatgatctgttacagactgtacagagcacatctggattagctattattctttttattaagactatgtttcacccgtctgaaaagattcctcatttgattagcagtgtgctgcttcgttcagtggactgcaccagtgtccccgagtggtttatgagcagctgcaggagcctctgttgtggtgacatctctcagtcagctgtcttattcctctgtcaggggacacttgccatgttggactggcagaacggaagcatgggtcggagtggggaggccctgctcttggatactgcacatgttttgttcaccttgagttcacagattaaagagccaacgctggaaatgtttctgtctagaatcttagcatcctggactaattcagccatacaagtccttgaatcaagttccccgagcctaacggacagcctgaatgggaattcaagtatagttgggagacttttggaatatgtctatacccattgggaacatccattggatgctctgagacaccaaaccaaaatcatgttcaaaaaccttctccaaatgcaccggctcactgtggaaggtgcagatttcgtccctgatcctttctttgtggaattgactgagagtcttttacgattggaatggcatattaaaggaaagtacacgtgccttggttgtttggtagagtgcataggagttgaacatattttggctatagataaaactattccatctcaaatcttagaggtgatgggagaccagtcattggtaccttatgcaagtgacctcttggaaaccatgtttagaaatcataagagtcatttgaaatcccagactgctgagagttcttggattgaccagtggcatgagacttgggtttctcctctcctttttatattgtgtgaaggaaacttggatcaaaaatcttacgtgattgattattacttgccaaaattattaagttacagccctgaaagcttacagtacatggtaaagattcttcagacttctattgatgctaaaactggacaagagcaatctttcccatccttagggtcttgtaatagcaggggggctctgggagctttgatggcatgtctgcgaatagctagagctcatggacatcttcagtctgcaactgatacctgggagaacctcgtgtctgatgcaagaataaagcaaggcttaattcatcagcattgccaagtaaggatagatacattaggcttgctttgtgaaagtaatcggagcacagaaattgtttccatggaagaaatgcagtggattcagttctttattacatacaatcttaacagccagtctccaggagtgcggcaacagatctgttctcttcttaaaaagttgttttgtaggatacaggaaagttctcaggtactttataaattggagcagagtaaatccaaacgtgaaccagagaatgagttaaccaaacagcacccttctgtttctttacagcagtataagaatttcatgtcatccatttgtaacagtctttttgaagcattgtttcctggatcttcctactcgactagattttcagctttaaccattttaggttcaatagctgaagtttttcatgtcccagaaggcagaatttatacagtatatcagctgagtcatgatattgatgttggtcgtttccaaacactaatggaatgttttaccagcacttttgaagacgtgaaaattttagcatttgatcttctgatgaagttatcaaaaacagctgtacattttcaggattcggggaaactgcaaggcttatttcaggcagcattggagctcagcacaagcaccaaaccatacgactgtgtgacagcttcctacctgctgaacttcttaatctggcaggatgctctaccgtcatccttgtctgcctacttaactcagcaagttgcatgtgataatggagataggcctgctgctgtggtggaaaggaacacattaatggttatcaaatgcttgatggaaaatcttgaggaagaagtatctcaggctgaaaattctctgcttcaggcagcagcagcatttccaatgtatgggcgagtccactgtataacaggagctttgcagaagttatctctaaacagcctgcagttggtgagcgagtggagacctgtggtagagaagctccttttgatgtcctacaggctttccactgtggtgtctccagtcattcagagctcatcccctgaaggcctcatcccaatggacactgattcagagtcagcaagccgcttacagatgattctgaatgagattcagcctcgagatactaatgattattttaaccaagccaaaatattgaaagaacatgatagctttgatatgaaggacttgaatgctagtgtggtgaatattgatacttctacagaaatcaaaggtaaagaagtaaaaacatgtgatgtaactgcgcagatggtgctggtatgttgttggagaagtatgaaggaagttgctttacttttaggcatgttgtgccagcttctgcccatgcagcctgtgccagaatcttctgatggattattgacggtggagcaggtaaaagaaataggagattactttaaacaacaccttttgcagtccaggcacagaggagcatttgaattggcttatactggttttgtgaaactcactgaagtactaaacaggtgcccaaatgtgagtctgcaaaagctgccagaacagtggctatggagtgttttagaggaaattaaatgcagtgatccttcatctaaactctgtgctacaaggcgcagtgctggaattcctttctacatacaggcactgttggcatctgaaccaaagaaaggcagaatggatttgttgaaaataacaatgaaagagttaatctctttggctgggcctacagatgacatacagagtacagtcccccaggttcatgctttaaatatccttagagcattgttcagagatacgcgcctgggagaaaatattattccttatgttgctgatggagctaaggctgcaattctgggttttacatcaccggtctgggcagtgcgaaattcatccacacttctctttagtgccttgatcacaagaatttttggagttaaaagggcaaaggatgaacattccaaaacaaataggtgtggtcactcacctgtctaccactcccgtgaaatggcagctcgtgccttggtcccatttgttatgatagatcacattcctaataccattcgaactctgttgtccacactccccagctgcactgaccagtgtttccggcaaaaccacattcatgggacacttctccaggtttttcatttgttgcaagcctactcagactccaaacacggaacgaattcagacttccagcacgagctgactgacatcactgtttgtaccaaagccaaactctggctggccaagaggcaaaatccatgtttggtgaccagagctgtatatattgatattctcttcctattgacttgctgcctcaacagatctgcaaaggacaaccagccagttctggagagtcttggcttctgggaggaagtcagagggattatctcaggatcagagctgataacgggattcccttgggccttcaaggtgccaggcctgccccagtacctccagagcctcaccagactagccattgctgcagtgtgggccgcggcagccaagagtggagagcgggagacgaatgtccccatctctttctctcagctgttagaatctgccttccctgaagtgcgctcactaacactggaagccctcttggaaaagttcttagcagcagcctctggacttggagagaagggcgtgccacccttgctgtgcaacatgggagagaagttcttattgttggccatgaaggaaaatcacccagaatgcttctgcaagatactgaaaattctccactgcatggaccctggtgagtggcttccccagacggagcactgtgtccatctgaccccaaaggagttcttgatctggacgatggatattgcttccaatgaaagatctgaaattcagagtgtagctctgagacttgcttccaaagtcatttcccaccacatgcagacatgtgtggagaacagggaattgatagctgctgagctgaagcagtgggttcagctggtcatcttgtcatgtgaagaccatcttcctacagagtctaggctggccgtcgttgaagtcctcaccagtactacaccacttttcctcaccaacccccatcctattcttgagttgcaggatacacttgctctctggaagtgtgtccttacccttctgcagagtgaggagcaagctgttagagatgcagccacggaaaccgtgacaactgccatgtcacaagaaaatacctgccagtcaacagagtttgccttctgccaggtggatgcctccatcgctctggccctggccctggccgtcctgtgtgatctgctccagcagtgggaccagttggcccctggactgcccatcctgctgggatggctgttgggagagagtgatgacctcgtggcctgtgtggagagcatgcatcaggtggaagaagactacctgtttgaaaaagcagaagtcaacttttgggccgagaccctgatctttgtgaaatacctctgcaagcacctcttctgtctcctctcaaagtccggctggcgtcccccaagccctgagatgctctgtcaccttcaaaggatggtgtcagagcagtgccacctcctgtctcagttcttcagagagcttccaccagctgctgagtttgtgaagacagtggagttcacaagactacgcattcaagaggaaaggactttggcttgcttgaggctgctggcctttttggaaggaaaggaaggggaagacaccctagttctcagtgtttgggactcttatgcagaatcgaggcagttaactcttccaagaacagaagcggcatgttgaagaaaatctgggggattgggatgggggtatgtgtggatttttcctccactaaatctgcaggaaacatgttgaacataaattcaaaaattttatccc

SEQ ID NO: 17 - protein, 1879 aa, Homo sapiens
MGVKKKKEMQVAALTICHQDLETLKSFADVEGKNLASLLLHCVQLTDGVSQIHYIKQIVPLLEKADKNGMCDPTIQSCLDILAGIYLSLSLKNPLKKVLASSLNSLPDFFLPEAMHRFTSRLQEELNTTDLYSYRKVTDNISSCMENFNLGRASVNNLLKNVLHFLQKSLIEILEENRKCAGNHIIQTQLMNDLLVGIRVSMMLVQKVQDFQGNLWKTSDSPIWQNMCGLLSIFTKVLSDDDLLQTVQSTSGLAIILFIKTMFHPSEKIPHLISSVLLRSVDCTSVPEWFMSSCRSLCCGDISQSAVLFLCQGTLAMLDWQNGSMGRSGEALLLDTAHVLFTLSSQIKEPTLEMFLSRILASWTNSAIQVLESSSPSLTDSLNGNSSIVGRLLEYVYTHWEHPLDALRHQTKIMFKNLLQMHRLTVEGADFVPDPFFVELTESLLRLEWHIKGKYTCLGCLVECIGVEHILAIDKTIPSQILEVMGDQSLVPYASDLLETMFRNHKSHLKSQTAESSWIDQWHETWVSPLLFILCEGNLDQKSYVIDYYLPKLLSYSPESLQYMVKILQTSIDAKTGQEQSFPSLGSCNSRGALGALMACLRIARAHGHLQSATDTWENLVSDARIKQGLIHQHCQVRIDTLGLLCESNRSTEIVSMEEMQWIQFFITYNLNSQSPGVRQQICSLLKKLFCRIQESSQVLYKLEQSKSKREPENELTKQHPSVSLQQYKNFMSSICNSLFEALFPGSSYSTRFSALTILGSIAEVFHVPEGRIYTVYQLSHDIDVGRFQTLMECFTSTFEDVKILAFDLLMKLSKTAVHFQDSGKLQGLFQAALELSTSTKPYDCVTASYLLNFLIWQDALPSSLSAYLTQQVACDNGDRPAAVVERNTLMVIKCLMENLEEEVSQAENSLLQAAAAFPMYGRVHCITGALQKLSLNSLQLVSEWRPVVEKLLLMSYRLSTVVSPVIQSSSPEGLIPMDTDSESASRLQMILNEIQPRDTNDYFNQAKILKEHDSFDMKDLNASVVNIDTSTEIKGKEVKTCDVTAQMVLVCCWRSMKEVALLLGMLCQLLPMQPVPESSDGLLTVEQVKEIGDYFKQHLLQSRHRGAFELAYTGFVKLTEVLNRCPNVSLQKLPEQWLWSVLEEIKCSDPSSKLCATRRSAGIPFYIQALLASEPKKGRMDLLKITMKELISLAGPTDDIQSTVPQVHALNILRALFRDTRLGENIIPYVADGAKAAILGFTSPVWAVRNSSTLLFSALITRIFGVKRAKDEHSKTNRCGHSPVYHSREMAARALVPFVMIDHIPNTIRTLLSTLPSCTDQCFRQNHIHGTLLQVFHLLQAYSDSKHGTNSDFQHELTDITVCTKAKLWLAKRQNPCLVTRAVYIDILFLLTCCLNRSAKDNQPVLESLGFWEEVRGIISGSELITGFPWAFKVPGLPQYLQSLTRLAIAAVWAAAAKSGERETNVPISFSQLLESAFPEVRSLTLEALLEKFLAAASGLGEKGVPPLLCNMGEKFLLLAMKENHPECFCKILKILHCMDPGEWLPQTEHCVHLTPKEFLIWTMDIASNERSEIQSVALRLASKVISHHMQTCVENRELIAAELKQWVQLVILSCEDHLPTESRLAVVEVLTSTTPLFLTNPHPILELQDTLALWKCVLTLLQSEEQAVRDAATETVTTAMSQENTCQSTEFAFCQVDASIALALALAVLCDLLQQWDQLAPGLPILLGWLLGESDDLVACVESMHQVEEDYLFEKAEVNFWAETLIFVKYLCKHLFCLLSKSGWRPPSPEMLCHLQRMVSEQCHLLSQFFRELPPAAEFVKTVEFTRLRIQEERTLACLRLLAFLEGKEGEDTLVLSVWDSYAESRQLTLPRTEAAC

SEQ ID NO: 18 - DNA, 30 bp, Artificial Sequence
  Description of Artificial Sequence: Synthetic primer
atgggagaaccaaatcgtcatccaagcatg

SEQ ID NO: 19 - DNA, 33 bp, Artificial Sequence
  Description of Artificial Sequence: Synthetic primer
tcaacatgccgcttctgttcttggaagagttaa

SEQ ID NO: 20 - DNA, 30 bp, Artificial Sequence
  Description of Artificial Sequence: Synthetic primer
tttccggcaaaaccacattcatgggacact

SEQ ID NO: 21 - DNA, 27 bp, Artificial Sequence
  Description of Artificial Sequence: Synthetic primer
tactggggcaggcctggcaccttgaag

SEQ ID NO: 22 - DNA, 26 bp, Artificial Sequence
  Description of Artificial Sequence: Synthetic primer
tggccgtcgttgaagtcctcaccagt

SEQ ID NO: 23 - DNA, 29 bp, Artificial Sequence
  Description of Artificial Sequence: Synthetic primer
gccagccggactttgagaggagacagaag

SEQ ID NO: 24 - DNA, 25 bp, Artificial Sequence
  Description of Artificial Sequence: Synthetic primer
gcttcaggcagcagcagcatttcca

SEQ ID NO: 25 - DNA, 26 bp, Artificial Sequence
  Description of Artificial Sequence: Synthetic primer
attgggatgaggccttcaggggatga

SEQ ID NO: 26 - DNA, 27 bp, Artificial Sequence
  Description of Artificial Sequence: Synthetic primer
cctgccccagtacctccagagcctcac

SEQ ID NO: 27 - DNA, 30 bp, Artificial Sequence
  Description of Artificial Sequence: Synthetic primer
gaactcctttggggtcagatggacacagtg

SEQ ID NO: 28 - DNA, 25 bp, Artificial Sequence
  Description of Artificial Sequence: Synthetic primer
actgcatggaccctggtgagtggct

SEQ ID NO: 29 - DNA, 27 bp, Artificial Sequence
  Description of Artificial Sequence: Synthetic primer
gcatgtggtgggaaatgactttggaag

SEQ ID NO: 30 - DNA, 30 bp, Artificial Sequence
  Description of Artificial Sequence: Synthetic primer
ctcagcacaagcaccaaaccatacgactgt

SEQ ID NO: 31 - DNA, 33 bp, Artificial Sequence
  Description of Artificial Sequence: Synthetic primer
agagtaaatccaaacgtgaaccagagaatgagt

SEQ ID NO: 32 - DNA, 30 bp, Artificial Sequence
  Description of Artificial Sequence: Synthetic primer
gcctgggagaaaatattattccttatgttg

SEQ ID NO: 33 - DNA, 26 bp, Artificial Sequence
  Description of Artificial Sequence: Synthetic primer
gtctgggcagtgcgaaattcatccac

SEQ ID NO: 34 - DNA, 27 bp, Artificial Sequence
  Description of Artificial Sequence: Synthetic primer
agactctacgcttccccgatggatggt

SEQ ID NO: 35 - DNA, 30 bp, Artificial Sequence
  Description of Artificial Sequence: Synthetic primer
caggcgcgtatctctgaacaatgctctaag

SEQ ID NO: 36 - DNA, 29 bp, Artificial Sequence
  Description of Artificial Sequence: Synthetic primer
gaagggtgctgtttggttaactcattctc

SEQ ID NO: 37 - DNA, 27 bp, Artificial Sequence
  Description of Artificial Sequence: Synthetic primer
gcgaatagctagagctcatggacatct

SEQ ID NO: 38 - DNA, 29 bp, Artificial Sequence
  Description of Artificial Sequence: Synthetic primer
atttttaccaaggttttaagcgatgatga

SEQ ID NO: 39 - DNA, 24 bp, Artificial Sequence
  Description of Artificial Sequence: Synthetic primer
agtgagccggtgcatttggagaag

SEQ ID NO: 40 - DNA, 28 bp, Artificial Sequence
  Description of Artificial Sequence: Synthetic primer
ctcagacgccgacgtgcacgagtgacta

SEQ ID NO: 41 - DNA, 31 bp, Artificial Sequence
  Description of Artificial Sequence: Synthetic primer
acgagaagtaaaacggtgcatagcctcaggt

SEQ ID NO: 42 - DNA, 36 bp, Artificial Sequence
  Description of Artificial Sequence: Synthetic primer
ggatatcttagcaggcatttatctttctttgagtct

SEQ ID NO: 43 - DNA, 30 bp, Artificial Sequence
  Description of Artificial Sequence: Synthetic primer
atattttgccatatgggagaatcggaagtc

SEQ ID NO: 44 - DNA, 24 bp, Artificial Sequence
  Description of Artificial Sequence: Synthetic primer
atttatgttcaacatgtttcctgc

SEQ ID NO: 45 - DNA, 20 bp, Artificial Sequence
  Description of Artificial Sequence: Synthetic primer
tgcagaatcgaggcagttaa

SEQ ID NO: 46 - DNA, 32 bp, Artificial Sequence
  Description of Artificial Sequence: Synthetic primer
ctggcaaattccatggttctgtcttgaagtga

SEQ ID NO: 47 - DNA, 32 bp, Artificial Sequence
  Description of Artificial Sequence: Synthetic primer
caatggaaccagaacatgaagccaagcagtct

SEQ ID NO: 48 - DNA, 30 bp, Artificial Sequence
  Description of Artificial Sequence: Synthetic primer
tagcatcctggactaattcagccatacaag

SEQ ID NO: 49 - DNA, 27 bp, Artificial Sequence
  Description of Artificial Sequence: Synthetic primer
gacggtggagcaggtaaaagaaatagg

SEQ ID NO: 50 - DNA, 22 bp, Artificial Sequence
  Description of Artificial Sequence: Synthetic primer
gcagctggggagtgtggacaac

SEQ ID NO: 51 - DNA, 30 bp, Artificial Sequence
  Description of Artificial Sequence: Synthetic primer
taattcatcagcattgccaagtaaggatag

SEQ ID NO: 52 - DNA, 27 bp, Artificial Sequence
  Description of Artificial Sequence: Synthetic primer
ggacatcaaaaggagcttctctaccac

SEQ ID NO: 53 - DNA, 22 bp, Artificial Sequence
  Description of Artificial Sequence: Synthetic primer
agtggagagcgggagacgaatg

SEQ ID NO: 54 - DNA, 24 bp, Artificial Sequence
  Description of Artificial Sequence: Synthetic primer
aagaataggatgggggttggtgag

SEQ ID NO: 55 - DNA, 25 bp, Artificial Sequence
  Description of Artificial Sequence: Synthetic primer
agcctaacggacagcctgaatggga

SEQ ID NO: 56 - DNA, 31 bp, Artificial Sequence
  Description of Artificial Sequence: Synthetic primer
tgctttgggagccaggtcactgagttactac

SEQ ID NO: 57 - DNA, 27 bp, Artificial Sequence
  Description of Artificial Sequence: Synthetic primer
actgctttgggagccaggtcactgagt

SEQ ID NO: 58 - DNA, 29 bp, Artificial Sequence
  Description of Artificial Sequence: Synthetic primer
tccagggaaattcactgctttgggagcca

SEQ ID NO: 59 - DNA, 28 bp, Artificial Sequence
  Description of Artificial Sequence: Synthetic primer
ggtagcgggagcaatcacaaaactgtaa

SEQ ID NO: 60 - DNA, 32 bp, Artificial Sequence
  Description of Artificial Sequence: Synthetic primer
ctcttcttttgataggacagcccttgttctga

SEQ ID NO: 61 - DNA, 27 bp, Artificial Sequence
  Description of Artificial Sequence: Synthetic primer
gaccgcttcttgcagaggctgagagtc

SEQ ID NO: 62 - DNA, 33 bp, Artificial Sequence; identical to SEQ ID NO: 19
  Description of Artificial Sequence: Synthetic primer

SEQ ID NO: 63 - DNA, 20 bp, Artificial Sequence
  Description of Artificial Sequence: Synthetic primer
ttaactgcctcgattctgca

SEQ ID NO: 64 - DNA, 29 bp, Artificial Sequence
  Description of Combined DNA/RNA Molecule: Synthetic primer
  Description of Artificial Sequence: Synthetic primer
cuacuacuacuaaaggatccgtcgacatc

1. A nucleic acid with expression altered in hyperplasias and/or tumors, characterised in that it comprises a nucleic acid sequence, selected from the group which comprises SEQ. ID. No. 1, 3, 4, 9 and SEQ. ID. No. 11 to 16 and in each case fragments thereof.

2. A nucleic acid with expression altered in hyperplasias and/or tumors, characterised in that it comprises a nucleic acid sequence, selected from the group which comprises SEQ. ID. No. 1, 3, 4, 9 and SEQ. ID. No. 11 to 16.

3. The nucleic acid as claimed in claim 1 or 2, characterised in that the tumor is selected from the group, which comprises epithelial tumors with a change to the chromosomal arm 2p and tumors with a change to the chromosomal band 2p21-22.

4. The nucleic acid of claim 1, characterised in that the hyperplasia is selected from the group comprising hyperplasias of the thyroid gland.

5. The nucleic acid of claim 1, characterised in that the nucleic acid is selected from a nucleic acid according to SEQ. ID. No. 1, 9, 13, 14 and/or 15.

6. The nucleic acid comprising a nucleic acid sequence, which without die degeneration of the genetic code would code for the same amino acid sequence as a nucleic acid of claim 1.

7. The nucleic acid, which hybridises to one of the nucleic acids of claim 1, in particular under stringent conditions.

8. A vector, characterised in that it comprises a nucleic acid of claim 1.

9. The vector as claimed in claim 8, characterised in that it further comprises at least one element, which is selected from the group, which comprises promoters, terminators and enhancers.

10. The vector as claimed in claim 8, characterised in that the vector is an expression vector.

11. The vector as claimed in claim 8, characterised in that at least one promoter is in the in-frame with at least part of a nucleic acid of claim 1 coding for a polypeptide.

12. A polypeptide coded by a nucleic acid of claim 1 or with an amino acid sequence according to SEQ. ID. No. 2 or 5 to 8, 10 or 17.

13. The polypeptide as claimed in claim 12, characterised in that it is modified.

14. A cell, in particular an isolated cell, which comprises a vector as claimed in claim 8.

15. An antibody, characterised in that it is directed against a polypeptide as claimed in claim 12.

16. The antibody as claimed in claim 15, characterised in that it is directed against a nucleic acid of claim 1.

17. A ribozyme, characterised in that it is directed against a nucleic acid as claimed in claim 1.

18. The ribozyme as claimed in claim 17, characterised in that it comprises at least a part of a nucleic acid as claimed in claim 1 or of a nucleic acid substantially complementary thereto.

19. An antisense nucleic acid comprising a sequence, which is substantially complementary to or substantially identical to one of the nucleic acid sequences as claimed in claim 1.

20. RNAi comprising a sequence, which is substantially complementary or substantially identical to one of the nucleic acids as claimed in claim 1 or a part thereof, whereby the RNAi preferably comprises a region having a length of 21 to 23 nucleotides, which is substantially complementary or substantially identical.

21. A primer or nucleic acid probe comprising a nucleic acid, whereby the nucleic acid is substantially complementary or substantially identical to one of the nucleic acids as claimed in claim 1 or a part thereof, whereby the primer and/or the nucleic acid probe has a length 12 to 32 nucleotides, preferably 14 to 28 nucleotides and preferably 20 to 28 nucleotides.

22. A method for determining a compound, which influences, in particular inhibits, the effect of a translation product of a nucleic acid as claimed in any one of the preceding claims, characterised by the following steps:
providing the translation product and the compound
contacting the translation product and the compound in a system, which represents the effect of the translation product, and
determining whether a change occurs in the effect of the translation product under the influence of the compound.

23. The method for determining a compound, which influences, in particular inhibits, the effect of a transcription product of a nucleic acid as claimed in any one of the preceding claims, characterised by the following steps:
providing the transcription product and the compound
contacting the transcription product and the compound in a system, which represents the effect of the transcription product, and
determining whether a change occurs in the effect of the transcription product under the influence of the compound.

24. The method as claimed in claim 22 or 23, characterised in that the system is selected from the group, which comprises cellular expression systems, cell-free expression systems, assay for determining the interaction between compound and translation products, and assay for determining the interaction between compound and transcription products.

25. A method for determining genes, responsible for the formation of hyperplasias and tumors, in particular of the thyroid gland, comprising the following steps:
detecting the break points in chromosomal aberrations of the hyperplasias and/or the tumors,
determining genes, which lie inside a region of 400 kbp, preferably 150 kbp, in every direction from the breakpoint region of the chromosome arm 2p, preferably the chromosomal band 2p21-22, and
determining whether the translation/transcription of the gene in a cell of the hyperplasia or of the tumor changes relative to a non-hyperplasia cell or a non-tumor cell.

26. Use of a nucleic acid as claimed in in claim 1 and/or of a ribozyme as claimed in claim 17 and/or an antisense nucleic acid as claimed in claim 19 and/or a RNAi as claimed in claim 20 and/or a nucleic acid probe as claimed in claim 21 for diagnosis, in particular in vitro, and/or therapy of functional disturbances of the thyroid gland and/or hyperplasias of the thyroid gland and/or tumors, in particular thyroid gland tumors.

27. Use of a nucleic acid as claimed in claim 1 and/or of a ribozyme as claimed in claim 17 and/or an antisense nucleic acid as claimed in claim 19 and/or a RNAi as claimed in claim 20 and/or a nucleic acid probe as claimed in claim 21 for the manufacture of a drug, in particular for therapy and/or prevention of functional disturbances of the thyroid gland and/or hyperplasias of the thyroid gland and/or tumors, in particular thyroid gland tumors.

28. Use of a polypeptide as claimed in claim 12 for diagnosis, in particular in vitro, and/or therapy of functional disturbances of the thyroid gland and/or hyperplasias of the thyroid gland and/or tumors, in particular thyroid gland tumors.

29. Use of a polypeptide as claimed in claim 12 for manufacture of a drug, in particular for therapy and/or prevention of functional disturbances of the thyroid gland and/or hyperplasias of the thyroid gland and/or tumors, in particular thyroid gland tumors.

30. Use of an antibody as claimed in claim 15 for diagnosis, in particular in vitro, and/or therapy of functional disturbances of the thyroid gland and/or hyperplasias of the thyroid gland and/or tumors, in particular thyroid gland tumors.

31. Use of an antibody as claimed in claim 15 for the manufacture of a drug, in particular for therapy and/or prevention of functional disturbances of the thyroid gland and/or hyperplasias of the thyroid gland and/or tumors, in particular thyroid gland tumors.

32. A kit for the diagnosis of functional disturbances of the thyroid gland and/or hyperplasias of the thyroid gland and/or thyroid gland tumors, characterised in that the kit comprises at least one element, which is selected from the group comprising a nucleic acid, a vector, a polypeptide, a cell, an antibody, an antisense nucleic acid, RNAi, a ribozyme, a primer and/or a nucleic acid probe, in each case as claimed in any one of the foregoing claims.

33. A method for proving functional disturbances of the thyroid gland and/or hyperplasias of the thyroid gland and/or tumors, in particular tumors of the thyroid gland, characterised by the steps:
contacting thyroid gland material with the agent, which is selected from the group comprising a nucleic acid, a vector, a polypeptide, an antibody, an antisense nucleic acid, RNAi, a ribozyme and a cell, in each case as claimed in any one of the preceding claims, and
determining whether functional disturbances of the thyroid gland and/or hyperplasias of the thyroid gland and/or tumors of the thyroid gland are present.

34. The process as claimed in claim 33, characterised in that the thyroid gland material is present ex vivo.

35. The process as claimed in claim 33, characterised in that the thyroid gland material is part of a cytological preparation.

36. Use of a nucleic acid as claimed in claim 1 or of a part thereof as primer and/or as probe.

37. A primer for displaying and/or screening and/or detecting a nucleic acid, characterised in that it is substantially complementary or substantially identical to a part of a nucleic acid sequence as claimed in claim 1.

38. A method for displaying a nucleic acid, comprising a sequence, which can be detected in thyroid gland tumors or goitre, in which there is an aberration with a fracture point in the chromosomal band 2p21-22, whereby the sequence lies at least partially inside the chromosomal band 2p21-22, characterised in that the process comprises the steps:
providing primers, in particular primers as claimed in claim 35, for carrying out a polymerase chain reaction,
providing a nucleic acid sequence taken from the band 2p21-22 of the human chromosome 2 or a nucleic acid as claimed in any one of claims 1 to 7,
mixing the nucleic acid sequence or the nucleic acid with the primers,
performing a polymerase chain reaction.

39. A pharmaceutical composition, characterised in that it comprises: at least an agent, selected from the group comprising a nucleic acid, a vector, a polypeptide, a cell, an antibody, an antisense nucleic acid, RNAi, a ribozyme, a primer and/or a nucleic acid probe, in each case according to one of the preceding claims, as well as combinations thereof, and at least a pharmaceutically acceptable carrier.

40. A method for the treatment and/or prophylaxis of tumors and hyperplasias, characterised in that a compound is administered to a patient, which prevents the effects of changed expression in nucleic acids as claimed in any one of the preceding claims.

41. Use of a compound, which prevents the effects of changed expression in nucleic acids as claimed in any one of the preceding claims, for manufacturing a drug.

42. Use as claimed in claim 41, characterised in that the drug is for the treatment and/or prophylaxis of tumors and/or hyperplasias, in particular of tumors and/or hyperplasias of the thyroid gland.

43. Use of a nucleic acid having a sequence, whereby the sequence is selected from the group, which comprises SEQ. ID. No. 1, 3, 4, 9 and SEQ. ID. No. 11 to 16, or derivatives thereof and/or polypeptides coded thereby or derivatives thereof for the manufacture of a drug, in particular for the treatment of functional disturbances of the thyroid gland and/or hyperplasias of the thyroid gland and/or thyroid gland tumors and/or for the manufacture of a diagnostic agent, in particular for the diagnosis of functional disturbances of the thyroid gland and/or hyperplasias of the thyroid gland and/or thyroid gland tumors.

44. Use as claimed in claim 43, characterised in that the polypeptide has an amino acid sequence according to No. 2, SEQ. ID. No. 5 to 8, 10 and 17.

45. Use as claimed in claim 43 or 44, characterised in that the nucleic acid would hybridise with the nucleic acid according to one of the SEQ. ID. No. 1, 3, 4, 9 and SEQ. ID. No. 11 to 16 without the degeneration of the genetic code.

46. Use of a polypeptide with a sequence, whereby the sequence is selected from the group, which comprises SEQ. ID. No. 2, SEQ. ID. No. 5 to 8, 10 and 17, or derivatives thereof for the manufacture of a drug, in particular for the treatment of functional disturbances of the thyroid gland and/or hyperplasias of the thyroid gland and/or thyroid gland tumors and/or for the manufacture of a diagnostic agent, in particular for the diagnosis of functional disturbances of the thyroid gland and/or hyperplasias of the thyroid gland and/or thyroid gland tumors.

47. A method for screening a means for the treatment of functional disturbances of the thyroid gland and/or hyperplasias of the thyroid gland and/or tumors, in particular thyroid gland tumors, and/or of a diagnostic agent for the diagnosis of functional disturbances of the thyroid gland and/or hyperplasias of the thyroid gland and/or tumors, in particular thyroid gland tumors, comprising the steps:
providing a candidate compound,
providing an expression system and/or activity system;
contacting the candidate compound with the expression system and/or the activity system;
determining whether, under the influence of the candidate compound, the expression and/or the activity of a nucleic acid with a sequence is changed, whereby the sequence is selected from the group, which comprises SEQ. ID. No. 1, 3, 4, 9 and SEQ. ID. No. 11 to 16, or derivatives thereof and/or polypeptides coded thereby and/or polypeptides having a sequence according to SEQ. ID. 2, SEQ. ID. No. 5 to 8, 10 and 17 derivatives thereof.

48. The method as claimed in claim 47, characterised in that the candidate compound is contained in a compound library.

49. The method as claimed in claim 47 or 48, characterised in that the candidate compound is selected from the group of compound classes, which comprises peptides, proteins, antibodies, anticalins, functional nucleic acids and small molecules.

50. The method as claimed in claim 49, characterised in that the functional nucleic acids are selected from the group, which comprises aptamers, aptazymes, ribozymes, spiegelmers, antisense oligonucleotides and RNAi.

51. Use of a nucleic acid having a sequence, whereby the sequence is selected from the group, which comprises SEQ. ID. No. 1, 3, 4, 9 and SEQ. ID. No. 11 to 16, or derivatives thereof and/or polypeptides coded thereby or derivatives thereof and/or a polypeptide with a sequence according to SEQ. ID. No. 2, SEQ. ID. No. 5 to 8, 10 and 17 or of a derivative thereof and/or of an in particular natural interaction partner of a nucleic acid with a sequence, whereby the sequence is selected from the group, which comprises SEQ. ID. No. 1, 3, 4, 9 and SEQ. ID. No. 11 to 16, or derivatives thereof and/or polypeptides coded thereby or derivatives thereof and/or a nucleic acid coding therefor and/or the interaction partner of a polypeptide with a sequence according to SEQ. ID. No. 2, SEQ. ID. No. 5 to 8, 10 and 17 or of a derivative thereof as target molecule for the development and/or manufacture of a diagnostic agent for diagnosis of functional disturbances of the thyroid gland and/or hyperplasias of the thyroid gland and/or thyroid gland tumors, and/or for the development and/or manufacture of a drug for prevention and/or treatment of functional disturbances of the thyroid gland and/or hyperplasias of the thyroid gland and/or tumors, in particular tumors of the thyroid gland.

52. Use as claimed in claim 51, characterised in that the drug or the diagnostic means comprises an agent, selected from the group, which comprises antibodies, peptides, anticalins, small molecules, antisense molecules, aptamers, spiegelmers and RNAi molecules.

53. Use as claimed in claim 52, characterised in that the agent interacts with a nucleic acid with a sequence, whereby the sequence is selected from the group, which comprises SEQ. ID. No. 1, 3, 4, 9 and SEQ. ID. No. 11 to 16, or derivatives thereof and/or with a nucleic acid coding for a particularly natural interaction partner, interacts in particular with MRNA, genomic nucleic acid or cDNA.

54. Use of a polypeptide, which interacts with a peptide, coded by a nucleic acid with a sequence, whereby the sequence is selected from the group, which comprises SEQ. ID. No. 1, 3, 4, 9 and SEQ. ID. No. 11 to 16, or derivatives thereof and/or a polypeptide according to SEQ. ID. No. 2, SEQ. ID. No. 5 to 8, 10 and 17 and/or interacts with an in particular natural interaction partner thereof for the development or manufacture of a diagnostic means for the diagnosis of functional disturbances of the thyroid gland and/or hyperplasias of the thyroid gland and/or thyroid gland tumors, and/or for the development or manufacture of a drug for prevention and/or treatment of functional disturbances of the thyroid gland and/or hyperplasias of the thyroid gland and/or tumors, in particular thyroid gland tumors.

55. Use as claimed in claim 54, characterised in that the polypeptide is selected from the group, which comprises antibodies and binding polypeptides.

56. Use of a nucleic acid, which interacts with a polypeptide, whereby the polypeptide is coded by a nucleic acid having a sequence, whereby the sequence is selected from the group, which comprises SEQ. ID. No. 1, 3, 4, 9 and SEQ. ID. No. 11 to 16, or derivatives thereof and/or a polypeptide according to SEQ. ID. No. 2, SEQ. ID. No. 5 to 8, 10 and 17 and/or with an in particular natural interaction partner thereof in particular for the development or manufacture of a diagnostic agent for the diagnosis of functional disturbances of the thyroid gland and/or hyperplasias of the thyroid gland and/or thyroid gland tumors, and/or for the development or manufacture of a drug for the prevention and/or treatment of functional disturbances of the thyroid gland and/or hyperplasias of the thyroid gland and/or tumors, in particular thyroid gland tumors.

57. Use as claimed in claim 56, characterised in that the nucleic acid is selected from the group, which comprises aptamers and spiegelmers.

58. Use of a first nucleic acid, which interacts with a second nucleic acid, whereby the second nucleic acid has a sequence, whereby the sequence is selected from the group, which comprises SEQ. ID. No. 1, 3, 4, 9 and SEQ. ID. No. 11 to 16, or derivatives thereof and/or interacts with a nucleic acid, which codes for an interaction partner of a polypeptide with a sequence according to SEQ. ID. No. 2, SEQ. ID. No. 5 to 8, 10 and 17 for the development or manufacture of a drug for the prevention and/or treatment of functional disturbances of the thyroid gland and/or hyperplasias of the thyroid gland and/or tumors, in particular thyroid gland tumors.

59. Use as claimed in claim 58, characterised in that the interacting first nucleic acid is an antisense oligonucleotide, a ribozyme and/or RNAi.

60. Use as claimed in claim 58 or 59, characterised in that the second nucleic acid is the respective cDNA or mRNA.

61. A pharmaceutical composition comprising at least an agent, selected from the group, as defined by the use as claimed in claim 51, and at least a pharmaceutically acceptable carrier, in particular for the prevention and/or treatment of functional disturbances of the thyroid gland and/or hyperplasias of the thyroid gland and/or tumors, in particular thyroid gland tumors.

62. A kit for characterising the status of the thyroid gland, comprising at least an agent, defined by the use as claimed in claim 51.

63. A polypeptide comprising an amino acid sequence according to SEQ. ID. No. 2, SEQ. ID. No. 5 to 8, 10 and 17 or a functional fragment thereof.

64. Use of the polypeptide as claimed in claim 63 according to use as claimed in any one of the foregoing claims.
